United States Patent Application Publication US 2026/0191916 A1 - sequence listing, part 62

SEQ ID NO: 336 - DNA, 3812473 bp, Raoultibacter massiliensis (residues 1-1,906,237 of 3,812,473)
  source 1..3812473: mol_type = genomic DNA
gcttggtatgctgaggagcagggcaagcgcgtttcggcgcgaaaacgcatatccgagcagtatgagaaatatccaaacgtacatagcgcacgatacggtaagcccaagtacgggaacccgttcaagcacgtatgacgcatccactacaatctcacgtatacgctcggttgagttgaagcagtagttcgtatcgaaatagcccgtgtttatcgtcgggcttgtgttggttgcaaaaaagtaggtatcgacatggtcgtcaaatacgccgctaggatataggtatccaaatatattgttcagcgttgcttgtatgtaggagtctgggtgctgtgcaagcatttcgagccatacggttccgtaggctagcagatcttcagttgtcgcgtcagacttaaatgtgccctttaccggatcggacagttcggggttatatagtgctgcaaggttgtctcctgccaggacattgtttatttttgccatttgatcaggtgtgacatcgttgggatattccgtaagataacgtgcggtttgttggaagggaatgctcagcgcctccccgctgcttcccttgggaatgccgataaggggtaagcagacaaatatgagggatatcgaaaggagaattcctgagccgagcgatagaaggatcttgcgtcgcagagggcgaagagcaatgaccagcaggataaaagtcggcaggatcgcccacaggccattgttcctaaaaatgcaaaccatgacggaagaaaaggcaagtgccagccatgtgcgagaatcgataaggcgtggatcacttcgatttctaaggatgttaaaaagggcaagggaaaataggcagaaaaaagctgcaaacagcgtatccttttcaattgcttgtgcataggatgcccatatgggacatagggcaaaaaaagcagttgtgccgagcgaaagagcgcgaggaagcagaagcctgatctgaagagcgataacagaggcgtataccgataggcatattgtcgactgaacaacaacgacgaagagtattcccaaggaatctgatcctagggatcttccgatttgcatgagcgatccaatgatgcatgtggcgaaatacggctggtggttcgatggctcgaagtaaaccgggtttcctgcgtctggcatggggacggagaaaaactgattgagctgccaaaatccatcccacgataccgatccgggcaaaaaaatgcaaagtgttgctccccatgttgcgccaatggcgagatatggtgccaaaaaagggtgccgaaaaaaccagctagttagttttgcaagtacagattgcctttccttttgtgaaacgaagtcgatgcttttatgtcgatcgaatatgttgaacaggtgtttgaggcatgcatagaggagtattgaatagcccgctgacgcaaaaacagagcagaagaattgaaagcggttggagaatacgaacttccaagaatcgaattcataatagcttgcaccgagcagcaagcaaaacgaaaaaaagacactaagcactgctgcggtcttttcaaacggccgacttgcaataaaaaatgtctttcggtaaagaaggtaaagagcaataaaagctataagccagagaacgccactgggggggggttcaatgagactgtgaaaatatctcgcagacgatagaggaaagaggatatggttttaaggccgtacacaggttcaaggtcgatgccggctggtttggcgattttggtttggatggcgcaggcaaacactgtaaggagcgcgcaaagcgccgcaaacagggaacgaaaggctgttgacttcgtaaacatgcagccatgataacataagattatgatacagctaatagaactatcaaggtcactattatcgtatccgcagtgtgtatgacttatggatcatgctcaatcaatcgaatcaaaccaggctcggttgcgttgctcgatgaagtggagtccccttgtaaaaccatagctaatcttacgtctatgctatcattccttggatacggtaactaggaaggtagcagtggcggcaaagcatgcacgatcaggcgatatgccacaaagcagtgctcattcgaagagtttttcgaatgatgtgcggcatgatgctgcccgaaggtcctctcgcgggcgttctgcttctttggataggtcaccgttgccaagccaggtgcgcactccgctctctgccgaagcgaaagaaagaaaacgaagcgttgctagcgatgctttgaaatctgcagatagctgccagaaccgcggctccagcggggcgcatgggaggcatgcttccgatccaacgttactgcaaagagaacagcttgcccgctacagccgcgacaacagctccaactatagaagccgtcgcaagaagatggcgctatggaaaaaggcgatcattgcagttggctccctcatcctgcttgccgtgtgtgcaaccggcgcttacgctctgtggttttcggggcagcttaacgagcggctctccatgggcgatcagcaagatgccgcggtcgacgatgttctttcgtctcccattgcaggcgagccgttctacatgttgcttctcggctccgattcgcgagaggggtcgggcacgtcgggcaatgcggccgaatcgggggataaccagcgctctgacgttatgattctcgtgcgcgtcgatgcgaaaaacaagcaggttaccatggtgtcgatcccgcgcgatacgccgttgacgcttgaggatggcagcatcgtgaagcttaacgaggcatacaacatcgggggtgcggcgtactccatcaaagccgtttccgatcttaccggcgttccgataacccattatgccgaagtgcatttttctgaatttcaagatcttgtcgacaagctcggcggcgtcgaggtcgatgttcccatcgagctgtcgtacaaggatgcgctgacgggggagtgggttacgctccagccaggcgtgcagacgcttgatggccagcaggcgcagatcttcgctcgagcccgtcatgaatacgaaacggatcaagacgcccatcggcagaacaacatccgaacgctgctcgaggcgatcattaccaaggtgctcgaaaaaccgttttacgaactgcccgatactgtgctgaaccttgccgagagcgttggaaccgatttgaacgcagcggatcttgtaacgctggcgatggagtacgcgggcggttcgggaagcatgaccatgtatagctgcacgggtccaacggacggcgacatcaacgaatccgctggcgggatttggctttgctatgagaatcccgaaggatgggcgaatctcatgtccgttgtcgatgcgggcgaagatccgagtggtcttgatgtgaatagtactgccataatccccgcggcggcttaaaatatccaaacgatacaatgcaaagtaaatcaatgcgcattgcatatgcgcatttcgctgtcggcggtaaatggaaagggagattacatgggtcgttggataaaaatcgcgctggtatccctctgcgtggttttcgcattcgctttggctggttgtcagcaggagaagcaagagccccaaagcgatgtcgatgcaatgaaagaggcatcgacagacaaagccgcaggagcggaaacggagcctttctacactctcatcgttggaaacgactcccgtacgggtacggtggaaatcgacaaggcagattacgccgatggatcagggcgcgccgataccattatgcttgcccgcatcgatcctaaaacctaccaggtaacgctcgttacggtgcctcgcgataccgaggtcgatctaaacggatcgccgaacaagataaacgaggtatatcatcagggcggtatcgaggctctggtcaaagaggttgaaagcttgactggcgttaccatcaaatactacttcgatacaggattcgtcgagtttgaaaacttcatcaatgcgcttggcggcataacggccgaagttccgatcgatatgaatctgcaggatatcgtaagcggcaatgagatatccctgcctgccggttcgcaggacctcaatggagccgaatcgctcgtgctcgcacgcgtgcgtaaactgtacgcgtacgatctggacgcatgccgccagattcaggatcggcagatcgttgccgttgccatacagaaggtagctgaaaatcctggaaccgtcgacgcggcggttgcggcgttgaccgagcacgcaaagacgaattggcctgtcgacggccttaaggcaacgatcgccagctttgtcgatcatgccagcgagctttcgattctttccggcaccggtccgtatgcgggagatttcaacgataacgcaggcggactgtggcttacgtatcgggatgagggcgtatggagcgaagtgatcagcgttattgatgcgggcggcgatccgacttcggttgtggctttgcctgagatcgttccggtggggtaggctgcggcttataagataaaagagtatccgaattcgggcgttggcttaggccggcgcccgtttttcatgcaaagcgctttccaggcaaaattttcactcgacaaagagagctgtggtgggcgtagcccacgatgaggtgatgaggtgagctctgtgcgcctctagagaccgtgcattgatgcttgcgcttttacatgtcatccatcagatccatgagctcttgtttcgaatggacgccggtttttcggtagatattcttcacgtgggtctttgtggtgttctccgatacgaagaggcgctcgctgattttcgcaaagctcctccctttgaccagcatggaaagaatttcgctttcgcgctcggtcagcaggtaggtatccgctatgacctcaacgcgcttcgtttgttcgtcatcgagaaagattgacgtatcggcgcgctcgccatcgaacaaagatccgtttcgggcgtttcccgtggctagcagaacgactgcaatcagcaaggcgagcatgaggacgatgggctcggtgacgcgttccagctggaggggttgcgcgagcgaggccacgaacccgttggcgatagggctcaagaactgaccaacgaagagaaagaacaaaccgaacccgtatagaatgctcggtgcaacgttgcggtcgcgggcgatatgggccagaagcacccaaacatgaagctcaaacagaagatagacgacaacgcatacgaacctgtaagcgaacccgaacgagggatccatgaaaaaaagcagtgccaccgagacaccaaccacgaacagggtggcgaaagagtaggttccgttttcggacgagcgcgcttccatgaccaagtagacgagaaagaacagagcaatgaacccgattgcgatgaggaacaggcccacgagagaatcgggaaccgcttgcccagcgctgaaagtgcttaatgcgagctcgcgcagcgtactgtcgacgaatccgaaaatcgtcaggacgagggcgagcttcagaaacgctggtttggcatagcggtgaagcctctctttgcgttgtgtgaacgggcgcagtgccgtttcctcaggaagcgttttttgggcagcgaagcacagggtgccctccgaggcgatcgagaaaaccgtagcggcgatgaggactgcgggattgtcgagcaggagaagagcgacgtacagcgcagcagaaaacagcaatccaatagcggcattgagggcaaccgagctgttatcgagtttgcggtaagcgaagccccagcatataagcagatatccggttgctattcctccgaacaatcctgcagctagccctgtggcgtacgttgcttcgtaggaatcgaacatcgtggatgcgaatctggcgacagtcgcaacaatgcccataaccgttacgacgatgatcgtgtgctttctgtgcgagagaggctcaatgctggtgccgaaaatcccgacggcaaggaacgtgatgcagatcgtgcagaacacgccgagggcgaatcctgcaagcggcgaggcgtcatatccctcgactggcgcattgagaacgcggcccgttgcaaacatgatgcagaacacccatgtccaatgaaggcccaagccgatactgaggatcggatcgatcgacatctttgctgccggtatttcgatggagacggttttcatggatcctctcgcacggcgtacatcaacccaatcatacagtagcgcaacgctaccgagcctgctcatctaaaacaggtgaagcactcgacctgatatcacctgactaacggtacatgatatttcgctgccgtggaagaatcgtttcggttgcgtttcgaggcggttgccatccgaagcgcaatagggattcgggaaattgaaatggaggaatcacatgcataccttagatcgaaggaattttctcaaaggagcgcttgcgacgggcgtgatcggtgctgcaggcgtactggggggatgcgctgcgggcgagcagggaaaagcagctggcgacaatcaggcgaccgcagcgggacaggccgacaatgcggctttggcatacgatatcgccgaaacgaaggaggtcgacgtggtggttgtcggctcgggcaacgcgggtatggccgccgcggtcgaggcagccgagctcggagcgacaacattgctgcttgagaaggaggcaatcctgggcggcaacggaaaccatacctacgggccaagcggcttcgatacgaagtacagcagggcagcgggcgtaacgtacgactaccgagaggcagtggtcgaagatcagcgcatgttcaactacatccccaacattcgctactacatcgatatggcggaggcgtcgtcggacaacattgattgggtggccgaacacggcgtgcccatctcaagcgtagtggacaactacaagggaggtaatcccactatgcactactggggcgaagacggtggcacgatcgatccagtgcacggccgcgtcggatcggggaccgtgtacattgcgggtatgcaggcgaccgccgaatcgcttggcgtagagattctgacgaacacccctgcggttgatatcgttatggacggagctgatgtggtcggcgtgatcgcccaggactcgaaagggagctacatccagataaacgcgaaagcggtcatgctcggaacaggcggcatctgcggcaaccccgatctcatggcgaaggtcggcagggccgacgacgtggtttcgccgtacacgttctctccgggcacgactggcgatggatatacgttttccatgaaggcaggcgccttcgacacgattgggtcgctcggcttcatcgagcaacccgccttcgccgagatgggcttggctgagcagaaagcgcgcgagcagaatctcgattcatcgtattcgcccaaccgtaacgacgagcatcccgtgtggaacatcctcaagatgggcaaatgtctttgggttaacgaactgggcgagcgcttcgccgacgaatcagctgcgaaacccgaaggcggcatagccgggtgggcgacggctgcgatcatgtcccagcagaagagcttcgcgatcatcgacaaggcgattaccgatatgctcggtcaggactgtatggacttgatgctcagcgccaacgagcacaataccaagttccaggccgacaccctcgaagggctggcaaaggccatggatatcgactatgcgacgctgcaggcgacggtcgatcgctacaacgagatgtgcgccgcaggcgaggacatcgatttcggcaagtacgccgagggcctcgtgcccatcggcgaaggcccctactttgcgactcagctcggcgtgaccccgctctgctcgatcggcggcgtgcgcgtcaaccgccaaatgcaggctgctgacgttaactggaaccccatcaagggcctctacgtcataggcgtcgatagcttcccgttctacacgcagatgtattattttcagttgcccggtagcgccgttgcctacgagctgcattccggtctcgttgccgcgcgccatgcggcggagaatttgctgtagtggcaagatgctctaatatagatgggtctccaaaggcatctctggagacccatcgcaagcatttcggcatcggctcgttgcagcaatcgcccaatgcgccgagaaccatgaagcaaaaacgttctttcgatatacggtggcgcgctggcaaaccctaggcgagcggattccgatcagctaaagcgctccatactcgtcgtcgcttaccggttcgcaccattcgttcgaggcgcctgttgcgggaacttctacggccaagtgggtgaaccagctgtctttggcggctccatgccagtgctttacgtttgccggaatgttgacgacgtcgcctgcggaaagcgcttgtgcgggtttgccccattcctgataccagcccctccctgcggtgacgagaaggatttgtccgccgccttcttcggcatgatggatgtgccagttgtttcggcatcccggttcgaacgtgacgtttcctatggtcacttgctcggttgagagcatggcgagatagctttgaccgataaagtactgcccgaaagggttcttttcgccacggggaaatatctcggattcggtttcgttcataagttgcgtctcctctcgatttcggttgcctccattgaacaccttggagcgcgctcgaagtcaagggaaaatcgctcatagccatagggaagggcgggagccggggtcttctcgcccggcacccgcccgagacaacgcatgacgccgttgctccgagcatcccccgctcgatgtccggcttcgtttcgcgctacttcatgaacaagcccgccacttccatattctcgttgaacacgatcgtgtaggtgacggagacgttttcgtactgcgctccgatttctacgatctgcagagtctgccccgcttgcacgacctcggcgcaataggcgttgctgaacgatttgaactcgccccaatcggggctgatcaaggttcgcgcctccatcagcgattcttccgattcgggggttgccatggtttcggtggctatggctgcgaattcgtcgaagtcatctgcgttgagaacctcgatgacgtcttcggcctgggcaacgatcgtctgctcgtcaagaccgatgttttgccccgcgctatgctgctgaggcaaaaaccaccatgcggcaagggcgagcgctgcaatgactgcgagaacgacgccgacgacgacgatggcgatcttgttgcgcttcctcctctttccagcggcaagctcggtttcggagaggttctcgttgaattcccgagctacctggcgcggatctcccattcttgcttcgatctgctcccacggctctcctgcagccaacgccgccttgatatcggattctatgtcgcggacgaattcgtcgcgccgcgctttcgaacagatgaggctcttcgctatccttttcacatatgcctgctggttcatagctcctcgtttctctccatgatcgactttacgcagccgtcgaattcgttccaaatttcatacatttcgcgaagagctgcacggccctgtttggtaatcgcatagtactttcgggtgggttctcggccctcgtgatctcccatgcggctttttacgaggttcgcgtcttcaagacgatagagtatgggatagagcgtgccctctttgagggacagctgcccgctggtttggtcgcgcagttcgctgatgagctggtagccgtatttttcctcgggcgcaagcagttttaagacgagcatatcgagcgcgcctttcttcaactgctgtgcgaatcgctgctgcatggcctgtccttcttacgaataccctagcattgctaaatatacttgaatcgggagtacttagcaatgctaaatagctttgaaaaaggcaaacggcgcgtcgctcgcgaagaacctcgagcccataccgccggacatgctctacgcggatggcggggccatgtccgaggatgaggtcgctgaaacgtgcgacgcagacgggcctacgaccgctacctcgcagcctgcaaggagcgccacggacgctacctgcagctggtcgaactgctccgaagtccgggcggcggcttcggggatgctttcgagaggatcgtcaccgaagggccgaacccctgtggaaggaggatgcctctcatctcgttttccaggacttccgttcctcggcgaaatactgacgaaaggaggcccatggacggcatcccgcagaccactctacccgaagaggccgaggccgcaatcgtgcgagcgtcggagaggctggaaggcacggcgtcactgctggcaatgctcgaggacaaggccgacaaccggcaggtgaccgcagccgagcttgcagccgtgcgctgcatcgtggaggcctgtgccgccgacttaggtggggcatgtgaaaaggcctaaggtgcagtccgacctagcgcacggtcgcagttccgagataacgcgaaagtgtgttactgacacctgctacgacgtactgacacctactgcgatgtactgacctctcgttgggatgcgccctgataaggatgggcgggatgagcttggctatggtgtgctctattgcaacgtgatactatccaaaaaggctgctctggctcgaaacagtctttcgctttatcaaaactacccgttatgactattgcagcgcttttgctacaccgttccacgctccactgctacagcgctccatggcagactgccacaccctaacaatctaaattgccacgcgccccgaaaggggcgcttccttttccgccacaattccgatgggcacaaaagtgcccatcggaccattgcgagaaaggaagaaaaaatggtcaagtacagagaaatacttcggcaaagggcgatgggggtgagtgtcaggaacacagcgttctcgtgcaggtgctccaccgcaacggtaagggcggtgaccacccgcgcgaaggcgcacggcctcgagtggcccttgccggaggagatgaacgatgcggcgattcgagccgtcatctatccggcaaaggagcgatccgatatgtcgaaggcggagatcgaccatccccgcatcgacaaggagatgaaccgtcccggcatgaccatgctgacgctttggagggagtactgcgaggacgccctggcatcgggcatggaaccctacctgtactccgccttctgccagaagcaccgcgcctgggcggccgccaacaaggtctccatgcgcatcgagcgcaaacccgcccaggagatgcaggtcgactacgtcggcgacaccatggaggtgctcgacgccgacaccggcgaggcgcgcaaagtctacgtcttcgtggcgtgcttgccctattcgggcgagatgttcgccgagggcgcctacaacatgagagcggagtcctgggtcgaggcccacgtccacgccttcgccttcttcggcggcagcgtgccgatagtggttcccgacaacctcaagcagggcgtcgtcaagaacaccgtcgaagagctcgtgatcaacgagcagtaccgcaggatggccgagtactacgggtgcgccgtcgtgcccgcgcgccccaggaggccgagggacaagggggcggtggagatgagcgtgagggtcatcgagcagcgcgccatcgcgccccttcgcaaccagctgttcacctctctccggcagctgaacgaggctcttttggagaaggtgcgcgagatcaacgcccgtccgttccagaagcgcgagggcagcagggatgaggtcttcgtccgccaagagaagccgctgctcatcccgctgccgggcaagccctacgagatggttacccgcaaggttgtcactgttaattttaactaccacgtctcgtttgacggatgctggtactcggttccgttcagctacgtcaagcgcgaggtggagctatgcgccaccagatccgctgtttgggtggcctgcgacggcgagcgaatcgccatgcacgagcgcatctacggccctaggggaagctaccgcaccaaccccgaccacatgcccgattcccatcgcgactttgtggagtgggacgcgaagcgcttccgtaaatgggcggccgggatcggcccgtcctgcggggaagccgtcgatgccatcttgaggtcgcgcaagatcgagcagcagtcctaccgctcgtgccgcgcggtgctggcgctcgcgaagaagcacggaagggagatgctcgagcaggcgtgcgccaaggcctgctctctaacgcccaggccgagctacaagacgatcaaatcgattatctcggagatgggggccgcagggcccgaggaccaaaacgccggagcgtatctgcgcggaggcgactactaccggaacttgagcgagggggacgatgaataatgacggcgagccagacgacgatggacaaactctatggcatgaggatgtcggtgatggcgcaagcgtatcgcgaccaggaggaatcgcaaggagtggcagagatgaccttcgacgagaggttcgccatgatagtcgatgccgaatgggacgcgcgccgcatcaacaggaggacgaggctgttgcgccaggccggcttctccgatcccgaggcgaacattgccgatgtccgctacgacgcggatcgcaagctcgaccgcacgaaactgatagagctgtccaactgcacatggataagaggccaccgcaacgtcgtgatcacgggcgcgtcgggcgccggcaagagctggattgcctgcgcgctcggggtggcggcctgcaacgccttcttcagcgtaaggtacgtccggttgcccgaaatgctcgacgagctgaacgtgagcaagaacgaggattggctcaaggcgaagaagcgctacacgaaatgcgacttgctgatactggacgattggcttttggaaaagctcgaggggaaggcggcgcgcgagcttttagagatagtcgaggcgcgcttgcgcagcgggtccttattgatttgctcgcagttctcgccagcaggctggcattcaaagctcggggaaggagcaatcgcagatgccgtcatcgaccgcatagtctatcggtcggacgtcatccatattgaaggcgacgagtcaatgcgcaagcgcatcggctaagagcataaccggccgtattggccaagaggggcgcttgcgcgcccctcgcaatcagagcaacccgcattgctacgtggcagtctgccatggaacgctgtagcagtggagcgtggaacggtgtagcaaaaacggcgcaataagcacaaaaacaagaaatggttgcgttcaaacatcaattagagcaaacaggacttgaagttaccatgagagtttctcatggtagagagattaaagcagcttgtggacagttagctaatacatataataaagccaaaaaacaacaaaaataatttaattaaaagagccagacgcacagacgcagagccgataatatgcaatttgaaatactgctgttatcggctcttttttgatttaatttgtaatcgaaaatggttgattatctcaaaaaagccttgatttacgggcatacaagcaggatttcaagctgaatttactaccaatttactacttttgagggaaagagccttgatatgccgcccggaaccctgcaagcccaaacaccagcacacagcattgagaaagaataaatgaaaactgaatacgacgcatacgcggcgtttctctatcccaacacgggagaacaggaacgccgctttttttatgccctcatgttacgcagtaggggcgaaaagagccttgctatatgcggctttgcgggcgcacttctgccggggataaggatttatacctaaccccagcaaaacggcgttctatcgcgtaacaaatccacaaccaaaggagtgatgaagctatggcagttttccgagtggagcgcaacaagggctataccgttatgagcaaccaccatttacgcaacaaggagctgaccttaaaggcaaaggggcttttatcgcaaatgctgtcacttcccgaagattgggactatacccttgcggggctgtcacagatcaaccgggaaagtatcgacgctatccgtaccgccgtatgggagctggaaaaagccggatatatcaagcggcggcagggacgggacgagaaaggcaaaatgaccgccattgaatacaccatttacgagcagccccagccgccggacgacaccccgccggagttggataaaccgatattggaaaatccaacaccgggcaatccgatattggaaaatccgacaccgggtaaaccgacgacggaaaatccaatgcaattaaataaagatatacaaaagactgacttaccaacaaaagaaaaaataaatacagatttacaaagtacccattccattcctatcctttcccctaacccctctccctctgacggagaagcggctgcgccgccggaacggaagcgaaaggaaacggacacacagagcgcatacgaaatttaccgggagatcatcaaggacaatatctcctatgacattctcatgcaggatatgaagtttgacggggacaggctggacgagatcgttgacctcatgcttgaaaccgtctgcacccgaagaaagacgatccgcattgccggggacgactaccccgccgagctggtgaaagctaagtttatgaagttagacagcgaacatatccgctttgtgctggactgcatgaaagagaacacaacgaaaatccgcaacatcaagcagtatctacgggcggtgcttttcaatgccccgtccactatcggcaactattacacgtcccttgtggctcacgatatggcaagcggcgcacttacgccacaggagccgcacgacccctattcattcaaaccgggcgaaagcctgtaaacaacaaaaggaggattttattatggcacagagaacaggagcattggtatttgacgagcgcacagaccgctatgacatccgctttgaccttgccagctattacggcgggctgcattgcggggactgtttcgacgtattcacccgcggcaagtggaagccgacccgcattgaaatgaacatgaaacaggaatggtatttagttggtatcagagccgacgaccttaacgggctgcgggtgcgtatctgaccgccgccccatagactaccccgaaaggagggacagaacccatgcaggacgagatcaacgagaaaaccgttgccctgtatatcaagaccgggaagctgaccgccgaagtgctgcaaaaggcaatgaaagccgcgcttgcacaggcaaagaagcagatcggcaagcagccccacggaaaacagaccctaaagcagcttatgaagcagaacacgggcgtttccaacattgagatcacaaaagacaatatcaaggcgtttgagagtaccgccaaaaagtacggtatcgactttgcgctgaaaaaggacgcgacggaaaccccgccccgttaccttgtattcttcaaaggcagggacgcggacgcgctgaccgccgctttcaaggagttttccgcaaagaagctgacgcaggataagaagccctcaatccgaaaagcattagccgctttccgggaaaaggcaaaggagctgaacgccagccgccagcagaccaaaaacaaggacagggaggtatcgctatgaagccggaagtaaagaagctgcttatcctcaatctcccgtatctgctctttgtgtacctgtttgacaaggtgggcgcggctgtccggctatcccccggcatggacgcaagcgcaaagattttacatcttggggagggcttcaccgccgcctttgccagcgcagcccccagcttccaccccgccgacctgctgatcggcattgccggggcggtggttatccggcttgccgtttacttaaagggcaagaacgcgaaaaaataccgcaagggcattgagtacggttccgcacgttgggggacagccgaggacataaagccgtacatagacccggtatttgagaacaatatcccgcttacgcagacggaacggcttaccatgaacagccgcccgaagcagccgaagtacgcaagaaataaaaatatccttgtgatcggcggttccggcagcggcaagacccgttttttcgtcaaaccgtcgcttatgcaaatgcacagcagctatgttgtcacagacccgaaaggcacggttttaatcgagtgcgggaagctcttacagcggggcgggtacaggataaaagtgctaaatacaatcaatttcaagaagtccatgcgttacaacccctttgcctatctgcggagcgaaaaggacattttgaagctggtaaataccataatcgccaacaccaaaggcgacggggagaaatccggggaggatttttgggtaaagtcggaacggcttttctactgcgcccttatcggctatatccactacgaagccccggaggaagaaaagaacttcacgacgctgcttgaaatgataaacgccagcgaagcccgcgaggacgacccggaatttcaaagcccggttgacctcatgtttgaacggctggaagaaaaagacccggagcatttcgctgtccggcagtacaagaaattcctgctgtcggcgggcaagacgcgaagctctatcctcatttcctgcggcgcgaggttagcaccctttgacattaaggagctgcgggagcttatggaaacggacgaaatggagcttgacacgctgggggacagaaagaccgcccttttcgtcattatcagtgacaccgacgacacttttaactttgtcgtgagtattctctatacccagctattcaatctgctttgtgacaaggctgatgatgaatacggcgggcggcttcccgtccatgtaaggtgcttacttgatgaatttgcgaatatcgggcagataccgaagtttgaaaagctcatagcaaccataaggagccgggaaatctccgcttcaatcatcttgcagtcacagagccagctaaaagcaatctacaaagacaacgccgacacgattgtagggaattgcgacacgacccttttcttgggcggcaaggagaaaacgaccctcaaagaaatgtcggaaattttaggaaaggaaaccatagacagcttcaacacgtccgaaaccagaggacgggagctttcccacggcatgaactaccaaaagctgggaaaggagcttatgacgcaggacgagatcgccgttatggacggcggcaagtgcattttacaggtgcgcggggtgcgcccgttcttttcggataaattcgatataacgaagcacccgaaatacaagtacctctccgacgctgacccgaagaacgcctttgacatggagaagcacatcaaacgccgccccgccatagtgaagccggacgaggaatttgacgtttacgagatcgacggggcagagttacaggaggacgcagacagtgaatgaacgccccggcacagacaggcggcggtttacggtgcttgtcaacccgaaaatccgggaggaacagcggcggcaagctgccttacggaaatttatcaaggattgcgaacggctttacgaaaagaaccgggcgcatttacaggaggacgcagaccatgaataagcgtatcagaaagaaacagcagaagcagcgggagcagcggaaacagcttgaaatgaagtggctgctggatatggcaaacaccattgacgcgggaatacgggcgtggcgggaagaaatggaacgccgctatgtggagctttacgcggaggaattagcccgccgcatggggcttgtcccgaaacagtgacagggcttaaaagatttgcggcatggaaatgtggataacaggctatgggattatggataactccattcacagcacatggaaaagccaaagtgcggctttcccacgtcctgcaaacagagttacccacaatcccaaaagagcagccagttacccacattcccacaccgccgacggctacggaaacagaccctttcctacctgtcattcataaaaacattttttaaggagctgatcggaaatgaagaacgtaaacacgggctatctgatacgcgcccctaccgggggacgtaccgcccaaccccttacaactgaataccgccgcgccgcagaacttacgcggcgtggggacaccgcctttcatacagggcggtttttttatgcggcggcgaccaaacgctgaccgccttttgtccgcttgacggacagccgcacacgcggcagaaaggattttatcatggcattttttacttccgcagtaggcgttttgaaaacacttgttatcgctcttggggctggtcttggcatttggggcgttgtcaatctcatggagggctacggcaacgacaaccccggcgcgaatgctcatgtacggtaaagaagcaagcaaccgaaaacaatagatagaccgccagcactacactattccgaaccaaagaccaaaagataagcattttgagaaaatctaaacttttggattttcctacaatgccgactacggcggaatccctcccactccttatatatttctttctgtatacattgaatttgtatttagtaaaatgcagacaacaccacggatcggcttttggctggacaattccaaccaaacaccgcagcagacagtagaaaccattctgaacgttaggaagccggtatgattgttacatataaggggaagaaaaatttcttttagatacttgttttcctaaaactgatgtgatataataattcaattccagaaaaggagtaaaaaatatgcggcaaggtattcttaaataaaactataatcaaatagtgggaacaaaggattatgatagtcccttttgtaggggcttagttttttgtacccaatttaagaatacttttgccttatcaattttgacatatccccaaaaacagcactcacaaacaggtgtatgctgtatatgtgtatgtccgcaaattatcatccccagtggtaaaagtattttactgctggggatttttatgcccttcggggcagtaaagggaggacaatcacatgaaaataatcaatattggaattcttgcccatgtagacgctggaaagacgaccttgacggagagcctgctatatgccagcggagccatttcagaaccggggagcgtcgaaaaagggacaacgaggacggacaccatgtttttggagcggcagcgtgggattaccattcaagcggcagtcacttccttccagtggcacagatgtaaagtcaacattgtggatacgcccggccacatggattttttggcggaggtgtaccgctctttggctgttttagatggggccatcttggtgatctccgctaaagatggcgtgcaggcccagacccgtattctgttccatgccctgcggaaaatgaacattcccaccgttatctttatcaacaagatcgaccaggctggcgttgatttgcagagcgtggttcagtctgttcgggataagctctccgccgatattatcatcaagcagacggtgtcgctgtccccggaaatagtcctggaggaaaataccgacatagaagcatgggatgcggtcatcgaaaataacgataaattattggaaaagtatatcgcaggagaaccaatcagccgggaaaaacttgtgcgggaggaacagcggcgggttcaagacgcctccctgttcccggtctattatggcagcgccaaaaagggccttggcattcaaccgttgatggatgcggtgacagggctgttccaaccgattggggaacaggggagcgccgccctatgcggcagcgttttcaaggtggagtatacagattgcggccagcggcgtgtctatctacggctatacagcggaacgctgcgcctgcgggatacggtggccctggccgggagagaaaagctgaaaatcacagagatgcgtattccatccaaaggggaaattgttcggacagacaccgcttatccgggtgaaattgttatccttcccagcgacagcgtgaggttaaacgatgtattaggggacccaacccggctccctcgtaaaaggtggcgtgaggaccccctccccatgctgcggacgtcgattgcgccgaaaacggcagcgcaaagagaacggctgctggacgctcttacgcaacttgcggatactgacccgcttttgcgctgcgaggtggattccatcacccatgagatcattctttcttttttgggccgggtgcagttggaggttgtttccgctttgctgtcggaaaaatacaagcttgaaacagtggtaaaggaacccaccgtcatttatatggagcggccgctcaaagcagccagccacaccatccatatcgaggtgccgcccaacccgttttgggcatccatcggactgtctgttacaccactcccgcttggctccggtgtacaatacgagagccgggtttcgctgggatacttgaaccagagttttcaaaacgctgtcagggatggtatccgttacgggctggagcagggcttgttcggctggaacgtaacggactgtaagatttgctttgaatacgggctttattacagtccggtcagcacgccggcggacttccgctcattggccccgattgtattggaacaggcattgaaggaatcagggacgcaactgctggaaccttatctctccttcaccctctatgcgccccgggaatatctttccagggcttatcatgatgcaccgaaatactgtgccaccatcgaaacggtccaggtaaaaaaggatgaagttgtctttactggcgagattcccgcccgctgtatacaggcataccgtactgatctggccttttacaccaacgggcagagcgtatgccttacagaactgaaagggtatcaggccgctgtcggcaagccagtcatccagccccgccgtccaaacagccgcctggacaaggtgcgctatatgtttcagaagataatgtaacgtcttgcgcaatgcaagcgttcattgctggctattgcgaaatatcattgataaaatcagtatcagagaggagaaactattttgaaccaggaacagacgaatattacactttgacttccagctaaacaccgtgatcgaggacgacacagagccgaaagtacccctcacaggagaacaggaagaaagccttttatcctttatgcaaagtgatagcgtctatcagaaataccgtgacgaggttatcatactgctggggacggggcttaggatttccgaactctgcgggctgactgaaaccgaccttgactttgaaaaccgggtaatcaatgtagaccaccagcttttacggagcgcggaaacaggctactacatagagaagcccaaaacgcagagcggtatcagacaaattccaatgagtgaaaaagtgtatgaagcgttggggcgcgtgttggagaaccgcaagggagcgaagaaaatcaccattgacggttacagcaatttccttttcctcaaccgggacggttgcccgaaaacgaatgtgaactacgcgaccatgttccgggggcttgcgaagaagtacaacaagtgccatgaggaagccttacccaaagtaatgacaccccacaccctgcgccatacgttctgcaccaacttagccaatgcgggcatgaacccgaaagcgttacagtatatcatgggacattccaacattaccatgacgctgaactattacgcacacgcaactttcgcttccgcaaaggctgaaatggaaaggctgattgcagcatagccgcagacggatttactacttcttttactaccattgagagggaaaacctaaaaggttatgagggtatataagaacttctccccatatctaaaatgccgggaaagcccgaaaatacgggctataccgacatataagaacttctaaagagataatctaaattcaccaataattttcgattaaaatgattatgagatatgcattgctcatgatttgttctgcagcttggatttcaaatagcgactatggcttttggcgagaagttcgttgacttcttcctgcgtgaagccaagcaatcgcattattgctgcttccgacagcataaagagcccttttgtgtggaagaaaagatagtcatccgaatacttttctacttcggctcttctatgcatgaagggattgcgtcttttgcattgaaggtctgcgaacttcttcttatttgaaaaaacctcttttgaataagccccgacgaaatcgtagaggcccatcaaggattgccgtaatgtaggtctctttttttcggcgatttgcccaaaaacccactctttaagttcttcattttcgatgttctctgcagcagccttcagtcttgccatcatttcattatgttcagaagaggccgtcgaattcttttcatcgaccgctcttcccaatgtctcgataatctgcgaggcggcaatatactcaaaatcaaggtaagactgtcttcgcaagagcgctattggtacgtattcatgaatcgcaatcttgagatccccttcacagtgaagccacttatcgatcaattgctggctcctgtcagcaaaaacatcgtaaggaatgggtgaactctggggctttctccagtcatagtttttccgtcccagggcttcagtaacttcataggtgacaccatcgcagttcgttacggtcattgaatccagggaggcgtaccatcccgcacagaacgagacaagcaggagtatcgagaaagcaacatcgtctgcgtcttcgtagctttccggtgaaacaaactcgatatccaacctgcagcattgctccagattcacagaagcaggtaggttgcattttagattcattccagccctgacaatgatctttagtcgatcatccgtgtaccacgtttgttcaatgcatcccgaagatgagtggtctttcagaaatgtctggaatacgttatcgccgttatcagttttcaggatggcccaatcttccaagtgctgaagaccgaatgaaacctttctgatggatgcgcttatatcaaaagcctcattgccggaaagcatagtgctagcagagagttcttgcgaatcagaaagaatcgaaactgctatgcaatttctaagcgcaatgtgcttacctgaatcagaaatgccatataaccagtcggcaacttcagctcctgttcccatcggatcaatggcgctcccaacgattgaatcgcacgggatgaaaagacgtatcccatccttatctgtttgccgaacacctccgatggtgccacgcccgtcttcaagctcctcccaggagcgcccccatttcgcccattgagccagcctgttactcacgttacccatcgacctccttcttggttctaggacgccacagtaccttgccgaatatggcgttatcccgcatacgtcgttcgcacgctgtaggtcacaccatcatccagcgcggcgaagtgtttgcgggcgcagtcgatcttggccgcctcgcgggggcgtgttgccgggtcgatattgccaccgcctttggtctccacgacgaagaacacgcgcttgccgccgtactcgtcctcggacacataggcccagtcggggttgtatgaaccgaccggcgtgtcgatggtgaacctactcggcagcttcgcgaacaccttcacgtcctcggccatgtcgaggtcgtatgcgaagggccgctcgacggtggaagagtcgtacacgacgtaattgtagatggacttgtcgtgcttgggctcgtaggcgttctgatccagatatgcggtcaaatcctcgacttcaagcacttccatggtgtaccagtcgctctcgggaagcttcgtgtacttgatccccttggagaggacctccagcttcgcgcggtcgatcttggccgtcacctgcgcgaggaacgtggcaggatctgtcgcgaactcctcgaagcggccacacccctcaaggatgcgcttgatggtcgatcgcgtgagccccactgcatcctgcaattcccagatgggatcgggcaagtcgtaggcgcggacagcagacgtcttcacgatagcggttccggtcacggatgtgtcgatgcccgcatcgtcgatggagaggtcggctcgcgagctgatgacctcgacggggcggacctcgggcatgtgagaaatcccctcgatggctttctcgacaagcttgtcggtatcgacctcaagctcgtagcgcgtgcgcttgcggatcttctcccagagctcctggaaggcaggctcgtcggtgacatccttgcgaagctcaacggtgacctcgttgctcttgtccttgatgacgagcttccttgccttgttggagatgatggcctccacctgctcgcgggcaggctcgaactcgggcggcagctccacgacgtggtactcgacggcatgcttgagctcgggcgttatcgcgcctttctcggtgaccatgccagtatccaggaagtactcgtagagcgctctcgacccctcgaagccgagcatctcctcgtcgccgttttccttctcgacgacgatcttggtgaacgactccggcgtgaggattccgaacttgtagccgtcgcgctcgaactccttctgcagccctcgcgcgaactcgtcgtaggactcgttggcgatcacggtgagcacgttgacgctcgggtcatggttgcgctcgccctgctgattcacgcacaagcgcaacccgcgtcctatcttctggcgcttggtgaactcgtttccgctgtccacgagcgtgcatatctggaagatgttggggttgtcccagccctccttgagcgccgagtggctgaagatgaaggagatgttcttaacatcgtcatgcccgtccggaaagcttatcaggcgctccttggactgcatgatggcctcgaaggtggaggtgtcggcagcggtggtgccggaggtgtccttcattttgccctttccgtccatggagaagtaaccctgatgcaagggcgagggatccattggcagtggcacgcccttcttctcgtagcgtttgcgccaagtgccgtgctccacctcgtcggcgtactcctcctcgaagacgcgggcgtactcccctgcgctccaagacccgtcgtcgttgtagacgcggtatttctccaccttgtctatgaagaagagcgagagcaccttgattcccagaggatagagctcaagctgcttctgcaaatgatcgatgatcgtgcggcggatctgggcgcgcttcacggcctcgtcggccacatcgcccacagcctcgccgacctccaggtactcgccgttctggaactcgacgaactcgttgccctcctgggcggagatgttggtgattacccagccgccgcgcacgccctcgtagtcggggttctcgttgctcttcacgaacaggtcgttgccggtcgcgcacatgacggacttgcgcttctggccgcctttcttgtcgcgcacgtctatggtgagcttggccttgatcgagccgccgtttgcctgcacggagtccagcttcacgtagcttccgttcaggtcctcagccgagcgcaccgagtcaacgcagattcccttcaccagatgctggtcgaaggcgtccaccggcgtcaggcggtagagcatgttgtagggctccttgtgggtggccgagtagcgcaatacgaagagcgggttcaggctcttgatggctgccttcgcctgtttggaattgtccacgctctgaggctcgtcgatgatgacaatggggttgcactccaccacaagctcgcgcggcgagcgcccaccgataagcttttcgctccggcgatggaagaggttgctcttgttttcctctccgtctttggagaactccttgttgaatgcctggatgttgatgatcatgacctcaatggagctcgacagcgcgaaattgccgacagcgcccatattcttggagtcgtagacgaacacgtcgagtggcgcgcggtcgtagagctcgtcgaaatgcgccttggtgctctcgaaggatttgatcacgccctcacgtatggcaacggagggcaccacgatgatgaacttggtgaggccgtatttcttgttgagctcgtagatcgagcggatgtacacataggtcttgccggtgcccgtctccatctcgatggtgaagtcgcggaggcgtccgtctgtaagctcctcggttcgggcgaggcaattctcctcctggatttcgtggaggttgtcagcaagctggcgcggtgagacgcggatgccgttcgcgtggccgactgcaaaagttgcctgcgcaccaaagctggtgttgccggaaaactcgcgggaaaggaattcctgcccttggaacaggttgaccacagcgtcgatggcttgaacctgatggctctggtcggatgtgtatctgaattgcaagtctgccatgtctacgccgtcctcagctctatctcgtagccgagcttgttgccgacgcgcttgaatatttgtgcagcgttgagcttgatggtgtcggaaagcacggaatccaggaaaaagacgcgtttgggttcaagagcggcgattgcctccaaaacctcaacggtgagtccttcgtccatgcagcagatgagctcgtcagcggcgatagatgtaatggggtaacctgctacctctgtcttctccatgggaagcgaaagctcaagtccccacttgagcatcatttcgaagattatgtcgtcgtacgtgcgaccgggcttgatgagattgtcgacaagtgcgccgccctccacctggtcgaagttggagctgtcgagcttgagtatgcggaaaccaatgtcgggcatcctagtcgattcccctgacagtgttagctgtgcatttgacgcatgaacttcggcttctatttgttttccaacacgtcttaaccgctcttcggctatttcgcaaagattagaaagtcctaattcctctgctttcttattaccgaaagagcattctggcaattgaatgcatatagctttccttgttccaccatcgtgtaggttcattttcattagcgcatccattgagctggcagaaccggagaaaaagtcgaggaaaagggcggatgtatcgggaatcatatcgaataatttgattagaaattgagtcggtttggggtaagagaatatttttgcatcaccgaatatatctagaatttcatttgtcccatgttgagtataaacatcgtcaataattgactgcaattttcctcttctaatggatccgtcctcaagttttaaatactgtttggtttgaacgctccaacctccgtcgttgctctttgcaaactcaatctcattgttgtctagagcttctcgaacacgttccttactccagagccattgcctttttggccatacttctgttccatctggcgcgacaattggaaatacaaggttttctcgagcatcaagtgtcttattcgcttcgagcgggtgtgtcctatatgggcctcttttatcgaaatttgaatcttgtttcgtgtaatatctctggatggattcttcggtgagagggacggtaatatcttggatcatcgagatgtcttttgcatagattagaacgtaatcctgaagtgtaacgaggtatttttccttgggaccgccccccataacgttttttccaaataattgtatcgatgaaattcggcgagcccaaaatttcgtcgcagataaagcgtaacgagttcaattcgttgtcatcgatggagatagctatgatgccatcttctgataatagctcccgcgcaagccgcaatcttggatacatcatgctgagccagtcagaatgataacgaccggaagtatcagcgttggattgaccgctcaaaccagcttgatctttgtagttctcaattgagtcttggaagctgtccttgtaaacgaaatcatgaccggtgttgtaagggggatcgatatagatcatcttcactttaccgtggtagccgcgctggagaagcttcagtacctctaggttgtcgccctcgatgtagaggttttcggtggtatcccaatcgacgcttgccgcttcatcgggacgcagcgtagctgtagacggagtttgcgcctgtcgaatagcatcagtcttccctggccatgtgaaggcgtagcgctcctgcccttcatcaacctcgtctcccagaataagccgcagtttctcgaaatcgattgagccatcgccttcgacggcaatctcagggaagagcgccttcagctgctctatgcgttcggcaactaggtctttcgactccaagtccacatgcgtgaagctctcgtccatcagcttctgctcttcaggggtcattggcatatctcctttatctcatccataacgctttcgcgctgctgttccaactttcgcatctcaatgcgaagcttcgtcgtgtcagcaagagtcgcatctttcgacttccttgcatcgttcaattcgttgatcttcgacgttagcgcattcattgctttcacgtgtcccataagcaggttaacatccgaatctttgcaaaccgggtagaagcccagcgctttcacggagcgcgcaagcaaggttctgtcgcccaatgcgatcagatagtccatcagggtcgtctgcgggagcatcgcaaacgagagacgctccagaaagggcgcgtattcagggttttccaccttgaacaatccgcttgaactgattctctccgtcacgaaggctccgtgctctgcgaggttcttgcgccgcagagcggcagaaactgcaatacccgggttcgcaaaaccttctgcaaggatcaccgtggggttcgggaaacagccgtgcaccatgcgaagagcctccgctatcccggtcgtggagttcaggccgcacgtcaggaatatgactgactcgatgtcgtaggcatcgttcttcacgggcaagatgcgggagttcgacttgttcaggctcgcaaagaagcggatatcccgcaacttgtccagaagcttgacggacgcagctggtgccttggcaagcctcgcctgctccgccagctgcgtcttggggacgcgccgctctcctgcgagcgcgccttccggaagcttcagtatgtcgttccaggacaccgtcatttcgtcagcaccacgaagctcacgatggagtagtcatcgaatccgagagccgatccgctgccgacctctccggcaaagaagagctgctcgatccctttagcttcctgcacgcctgtgatgtcagagacggcggcctggagaagctcgttcacagaggccatgtcggtgccgtccttcgtcttcctgttgaagcgtttgcaaagatcgagcaggggctcgctctgcccatcgcatgccgccctcatgatgtcgagcgccgccttgggctgggtgtgcggagagatcacgctgccgttctcggtgacgtatatgacgtagtagggaaaagtcggattcgtgtccttggggtcgcgtctctcgtcgttctgcttgaggcagaagacgatgccgggctcgacgtcgtctgcaagctcgggcgggatcggtgcaacggcgcaaagcccgcacgacgagttctccaaaagccccggatgattctgggcgtagcgcttcagctccgcccgaaagtcgtcgaaggcgaagtccgtgatggatatgccgccggacatgtcctccaggttgagcacttcctcttggagcgcctggagctgctggcggcggtatttcaggtcgttcatctcgtcgttgcgcttgccttcgagcacgttctcctcgccggtcgcgctggcatcgagcagcgccatgcgacctttcacgcgcccctccagctggatgtactcgtcgagctcgatgtcaggccagaagttcaccagctggatcgtagtgttggcagaccccaagcggtcgatgcgcccgaagcgctgtatgatgcgcaccgggttccaatggatgtcgtagttcaccaggcagtcgcagtcctgcaggttctggccctcggagatgcagtccgtggcgaagaggatgtcaacctcgccgagctgcctgcgcgtgtcggagagttccttggacactggcgagaagtgcgcgagcaccgtgtcgaacgtggcgcgcttgatcttgagtgaatgggttttggcgatatcgcccgtgaccattgcgcattcgagcccaagctctctcgccaacggatcagacagttggctatagagatagttcaccgtgtccgcgaacgcgctgaacacgaggatctttctgttctcttcgttgaaggggcttttggccttctgctcgatgagctctcgcaggacgcgcagtttctcgtcgcgctcgggcgtgatctcgcgggcgtagctaagcagctgctcaagcacgctgatgtcgtagtcgatgtcctgcccgagcttcaatcggtcgaggtcggcgggatccacatgtaccttcgacgaggcgcggtattccgcgaaatcgtcctcgtcgtcgaacatggacgcgtctatctgcgccatgtcatgctgggcgacgagctcctccgccttgtccagcatccgcttggtggcgaggttaccctcgtagatgcgctcaagggtgatgcggaacgcgtcgatggagctctcaaggcgcttgagcaggttcacccgcatgaggttggccacggcatgggtgcggttgatctggctgtcgaagtcgcggccccacgtgtcgccgtacatgtccacgtacttctgctggcgtcccggcatcacgtaggcgagctgctgatactgcgcaaacgtgagagacgcgatcatgtcgttgagctcggctatggagggaagctttcccagcgtgtcgatgggcgggtggagcgatatgggcttgcggcgctcggggaattttgtgtcgcctgcggtgtagtacttgtcgatgtgcttgcggctgcgcgcgatagtgagcacgtcgagcagcttgaagtagtcggcgttcacggcgttcacgaatgattgcgtcgtgcgctcctcgtcgtcgagcttgctccactcttggaagcgctgctgcgccctgcgcgtcacgctgttgatggaggggatgccgtcctctgccagatactcatcatcgccctcggtgatgatctctatctggttgcgaaggtcgagcagacgattgttcaccggcgtcgctgacagcatgagcaccttcgtgcggatgcccgacttgatgatgtcctccatgaggcgatcgtagcggcttcgtttggtggtatctgtcggcttgttgcggaagttgtgcgactcgtcgatgacgatgaggtcgtagttgccccagcgaagcgtctccaagttcacgtctcccgaatatccggtatagcgcgagaggtcggtgtgattgagcaccgtgaagctcaaacggtcgtctgccagcacattgcgctcgtcgttgtccgccgcgtagagcgtccagttctctcgcagtcgcttgggggcgagcacgaggatgcgggcgtttctctcctggtagtacttcatgatggcgagcgcctcgaaggtcttgccaagacccacgctgtcggcgatgatgcagcccttgtacttctccaacttgtggatggcaccgaccacggcgtccttctggaagtcgtagagcttgttccagatcaccgagtcctcaagccggaactcaggttttatgggatcgtcctcgtcgtcttccatgaagtctcggaacagatggtagagggtgaggaagtagatgtactcgggagcgttatccttgtagagggtctggacctgctcggccaccgcatcggtcacttcctccaccatggcggggttgtcccatacggcatcgaacatggccttgaggccagcggcctcggtcttgccttcgtagtggctcacgcccatcacggttcccggcttgcggtcatatccgaggccttccaaggtgaagtcggcggatgcgcccatgaatgcctgtgccccgtcgttcgcattgtcgatgtagtatgtgccgcccggctggatggcaccgcgatgcttggcggacttgaaggtcgccctgtctcggatccattccgcgcattccttggcaagtgcgcgctggttgaggttgttgcgcaaggtgagctccagcccggtgccgccgatgccctgttcgcgcgagcggcgcttcagctcgaactccatgggctccttggcatcctgcatgcgcttcacgaaggtgggctcactgaacacgaagcggagctcttcaactttggaaagggcatctttcagctcaccgtaggcgaacactgtgaaatacgagctgatgatggacagcttcgcatcctcgtcgatggaacctgccaaggcgtccccgaggcgctcttctccgatattgctcaggaattccatagctagtctttcttcacgagctcgtcgatcatgcacatgcgcgcgaaggcactgaagcttagtcctttgagcgtcgccgcctcggcagcggcatccttgaggttgctcggtatgcgaatggtgatggcagtctgctcgccatcgactaggtattcatgcagctttgtcttgctcgcccctgaatctactagctccgtgaacttcatagacccctcccgaacggttcgttttgcaatacaaacgattataatgtctacaacggctccgagtagtaataaagaggactaacatggctgaatcggacaaagaaatcattccaagagctagcaacgaattcgatccatatgactcgaattatccgataaacctgcttgccgagggcatcggctccactctcgcggaagcggacaaagccgccgcagcaatcgtcaatgcggtttcgaaagatgcgtcgatagctatccagatcggagagtccctaactaagggagttcgatatgtggttgatacgcccgacgccatgatcgactcactcgaaaagggaaagattaagttcacgcaagagaacaatggcaaaatgtatgcccagttacgtcaaagcgacgggcattacggtgagaaggttcccatcaagcgggaggaattcagccaagggatagaccctgtgcagatggccaatgccatgcagctccgctcgctccaagcgcaagtgcaggaacttcaggacagcatcacgttaatcgacttcaatgtcagagacgtgctacaaggccagcagaatgaccgttttgcactataccaaagtggattagggctgtttctggaagcacgaggggtatctgatccagacctgaaaagacagctcacatctcaagctattcgcgctctatcagatgcttcttcgcaaatctccctgcagctcgaatcggatgttgattggctcaaaagcgagtcttacaaagaggcaaaggggaagaacaagcagctcatattggatcgcatagctagaatcaacaggggctttgagcatattcaccaatcgtatgtcctcagggctgccatctatggcgacatccacgagtatgccgcgatgataagcactctggaagcctattctcatttcatagactcgacaattgtctccaatgctggtttcctcgcagaatgcgatcctgacgatactggtcttgggcacggaacgtggaagaagcgtgcccgtctatcaatcaagatgggcgacctcgctaaacagctcagatctcaagatgttgttttatacctttcggaggcggatgaggacgaccatgaagaagattaagcttggatgcccgaatccagaatgcccaaaccacaagaagaacgccaagctcaagcacaacctgaccaattgtccgatatgtggctcttcgcttgtccatgtctgcaagaacaaaaaatgccacacactagtagaggatgacgacaagctctattgtgttctttgcaatgctgatcgcgaagataaaaaagtggtcgcagcgaaaggcgcagctttcgggggcgcaggactaatcggagctggcattaagtatcgccatgccatcaaagacgtcatcgtgaccttgattaagcgctaaaacaccttatatagttgcatacaccaccgttcgcgagttccttgtctgataggagcaggtggtgaaagcgaagagctgacttgcatcggatgtatctgctagctgcaagtccggcgtcccgataatctcctcaaggccttcttcctgatcgatcaccagcctctctcggctggcattcacgatgtctacggcgcagaccataagctcaagcgtatcgccgcttcgcttgtagacgatgatgcggctgtgctcacgggcgaatccctcgtcgataaagtccgcgaactcggcgaacgccgtaccgtcggacatatggtgtccgtaaaccatgacaaatcgagaatctatcgtgcattcgcaatctatatagggcgtaccatacgctccctggccaaatacgtccctatagagataagcattcgggacatcaggcatggcctgcgctataggctcgtctatgctcgtaccgggcacctcaacccaagcaacgacctctgcaggaaggctatcccagtcgatctgcctttccggttcttcctgatcgctcagattatcgaccgtctctgcaatctcgatgcgttcctcctctgacgcacaaagaatggtgagagtaagcgccgtgagtatggcgataatgattacgctcgtggccttcgccgcctttctgattctcttcattttttgctccttgtgccgaaaaagggtgggacgcctagcgagcgtcccaccctgccatccttagttctcatctaagattcctgccgcttgcgtcaagggtcggtttaatcctcgtcggttgccgtcagcgcttcctcttccatcttttcgatggcgtcggtctgtttgcggctgcggcggacgtaggcgtaggtcgcaccggcgatgccgcagagcaggatcaccgcgacgctggccgtgacgggatcgacctctgcgaaggcgcctgtcttcgggtatcccttaccggggttctccggctctggcacgggttccggctcggggaagctcacggtctggccgtcgtcgttgatgtcctcgtgagtggcgacgatgttctcctgcgcgtctgcgagcttctcgaagaacacgatgtcgcgtcccgcgagctcgcgcgtgtcgatctcgacctcgacgtcgatggtgccgtccggggtctcgggcacgaactcggtcattcccacgatgggaaggccgtcgtcgcccaagattgggtttccggtagccttgtccatgaacatggtgaatagcttgtaggtgctgcccggcgcaagcccggtgtaggcaaccgtgtcgatgagcttcacgtgctcgccaatggtgccgacgttggttccggtctctgagtcgcgcgcctgggtggcgatgtccactatggcgaccgtctgctccacgtcgttgatgtcggcgtgaaccatgtactctgcgccttcgaattccatcgtctcaaaggcaacgagcgacttgccagcgaggctcacaccggcgaaggtgaaggtcacatccaccgtgccgcacgactcctctgcagtgaaagtggtagacgctgtgatctcgctgccttcatcgtcgagtgcgggcccgccggtggtcttgtccatgagggctccgctcacggtgtactcgttttcggggatgagccccgtgtattcgatggtgtccacgatggtgagctcgtcgcgggcttggccctcgtgggttccgcttgctgagtccacagcggtcgtcttcatggtcttggacatgttgtcaagtacgaactcgtgcgtctgtgccatgaccccgctctcgtcccactcgatcatgccctggtcgttcactttgaaatcggtcacggtcgggtttccttcctcatcgaggtcggcgatcacgtagcccccgggagccgccacctcttggatgtggtagctcccgtgcttcgcgtaggcgagcgagatggtcccgttctcgtcggtcgtcatctcctcatcgaaggttccctcgtcgttccagatgcggaacacggcaccggcgacgggggtctcggggtcgagtgcgtccaccttcttgatctcagggtcggtgggctcgtttatcacggcttcctcgtggtcgtagaccgcaacatcctgtcctgcgtattcgagcaccacggtcttctcagccatgtcgagggcgtagccgtctttggccttggcctcgtaaacggtgtaggttccgagatagagctcgggcgtggtcaccttgccgtcctcgccggtcgtgagcgtggccacgatctcgccctcgttcgcacggatggtgccgtcaggcgtctggatggtctccgcagccttcacgatgtagacggactcgtccacggcctctcccgtccaggagtcggtcttggcgaccgtgatggtagccttctggggcatgtttgagaactctatgacaagcgggttctcccagccgttgtagccatcgccgacatggaacgtcttgccctcaagctccttcacgtagccgcagggtgcctggacctctttgagcgtgtagtcgccctcttcgagcagcatcggcagcgtcagctcgccgcgtgcgttggccgtccaggtgtcgatggtctcggtcacggggtaatgggaggtgtaggtgacgaggttgccgctcgcgtcctcaagctggaagctcacgggaagcgggacctgcttgccggtctcggcgtcaaccttcacaaccttgagaggagtctgcgggatgtggtcgttcacgagctgcggcggatcgtactgaccttcctcgcggatcgtggtcttccagtcctccacgggaaggagggtctttccccacttcgctttgaaggcgtcggccacgtcggccgggatcacctcatgaatacggtaggttccgtaggcgagcgcgcctgtccagctgccggacttgctccagccgttgacttcggcgttgtcgtccttggtggtggcgagcccgttctcgtccaccgtgatggtgcacacgcggttgccgggttcgacgagcttgccggtctcgggcgagagcactgcctctgcggaatcgttatagagctcgaacttcactccgggcacaaggatgcgcacgacctcctgcggcatgtcaccgtcaggctcgtcgtagacggtcacgggcacttccttcacgaggcggaaatctccgcgcttgacggtgtcgggcaccttgggcgagttgtaggtgtagacggactcgccctgagcgccgtcgggagtgatgcgcacgcagaacaccttaggatccccgccgtgcccgtcgtcgaggttgtagccctggggggcgcatgtctcctggatcagcaccgttcccaggggaatcgatgcgtcgccgttggtctggtagtagagggaatctcccgagtgcttgtactcgtcggccaggtaggcaaatccatcggcgtccgtctcgaacacccaggtgcgcgcaggggcaccggaagcctcggccgacgctgcgtcggcgtaatcgcccgcatagtagcgaacggtgaagagcgcgccttcaagcgtcgcgtctccctgcggctcgctctcgttggtgtcggcatcaaccttgccgacgagcatgcccacagggtctgactgcgggatgtcggatacgctctggccgttcacccgcgtggtctcatctgacctcacctcgaccggataaacggtcgggtcgagcgcgtgccccggagcctgcttagtctcgcgcacccagtagctgcccggctcaagctcctccagtatgccgtagccttcctcgtcggtcgtgatggtgcccgccaagtccgtgaggcccgagttgcggtacacggtgtagaccgcgccctccacggagtagagcgggttgccctcgcacatcccctcgttggcggtgaccttcaccaggtcgatcttaccgtagggggtgtacttgaacgacagaatcagctggtttccagcgcccgtgtagagcatgaacgcctcgaagttcgaggggacttcgccctgcatgcgcgagatcttgcggcctgtcgcatcgtcgttgcacatcgtgcctgacgagtcgaagccgatcacgttgtagcggcaccattccttgaaagactcgttgcacccgtagagcgcatagtttccgttggacgagaatgtatctgagagcaggatgtgcgcgagcgctgcgtagcgcgcatccgtcatggccgtgccgtcataccacgtgcttggccagaggcttgcatcgaatcccgggctgccgtagctgaaccagaggtccgctatggtctccgcatcgcgacccgataccgagcttatcgcgcttttggtgtaggtgcctgcaggcggcgtcgccgcagaggggttaccgcaataggccatctcgccgtcggcgtacatccatgtggtcgtgtatcccgcataggggatcttgcctccgatgctcaatgaagcggtctctgaggcgaatgcgctttgccccgaagccgcgagagcgcctatgaccgagctcagggcgacaagtgctgcgagcaggcagcgcagtatcttcgagccggaagcgccaatcatcgtaacttccatgtcgcaccgcctatcgggagacgggctcggcctggcgaacctcgcggctctggttggccgatgcctcacgggcctctttggccttgtcgtcgagcgacgcgaggtaggccgcccttcccttgtcgatgccctccttgagtgcagcgggcatcaccttgatgacctcgcgcacttgcttgccatcctcgtcgagcgtggggctgccgaccggctccagcacgctcttcttcagccaaacctccttctcggccagaagggggatgtcccggtagttctcgcccttgaagcgggacggattcacaaagaggggactgaactggctatagctcacatcctgtccgttgaccacggtgcccttgggcagcgtcaccgagttgaaggtcttggtctcgccggtcttcctgtcctcgtactcgatgccctcgtgcacgaagttcttgtgcagggtgatgtagatgttcttcttgtcgtccattttgctttctcctttgcgtcttgtgtctttttggggtctattggtggaatgcccctgtggatgccctgtcagcccataggcaccaccccctctcttgctggcatgcgcctagaacccgctcacgatgtctcgtgcccaggctccgctcttcacgagcgacaacacgagcaggatgcacatggcgaggtactggagcgcgtaggtgagcccgttcgctatcgcgtctatgggcgttccggttcccgggttcacggcgacgatgccgcccaggatcacggggaagctgatgagcaggatcagaatgatgagtcctgcgatgcagacggcaccgaagctcttcaggtacccgagcccgatctggcgcgtctgctcgaatccgaggaatgccagcgggatcggggagaacgccgccatgacgtagagctgtatcgcgcgcgcccagcagacgacgagcgccacgatgtacgcgacgagcacgacgagccagctgatgaccgcgacgacgagcagcgccaggagcgcagacaggtcgtcatcgcccgttacgatcgagactgccgtcatgtccagtgcgccgccagtgccgaagaggccctccacacggtctatcgcaaggcctatgacctcgtagatggccgccatgaggtcgaaggagtgctggatcaggaaaaggaatactgcgaagaacacgaggaggaacaccacctccttcacgcccgggaaggattggttgccgtccatgcgctgtgatatctcgatgagcttcaaagtgaacacgagcccgagaaccccgcaaccgatgggcagcacagcgacctgccagacgcctctggcgatgtcgtacatggagacatctcccgcgctggcgagcatggtctcgaacggtgccgacagtacgccgttagcgccaagcgagcgcatcacgtcggtctgagccgcgaagatccagttgcaccagtcgcggagcactccgcagagccatgcgttgatgtcgtccgcgatcgaaccccatgcgagctgagtgggaatgaacagcgtggagagcagaacgaatgtggctgcgaacgccactatgaatcgtctgtttgagacgaggcttttgactttgcccatccctatcagagcgcctcgatcgtgccatcggatgagcgcgttaccgagatcatggtcgatgccccatcgtcgagcgtgaacgttgtcgtagccgcgttgttggcatagtctatccacgcctccgcatcccagatggcgcgagtcgcgcttggggacacggctgctgcacgcgccgagacggcggcctcgatcttcgcggcgtcgatccccatcgcctcttcgagcttggaggtgacgccggtgaagctaagcgacctgtccccgacctgcacctgcctgtatgcgcaggcgagggcgtccgatctaagtacggtgtctgcgccgtcgctgctaacagagacgagaacggggctcgcggcatcggtcattgacttcgaggcgagcacggtggcctctatgccggaggaaagcagctcctcgccgtcaagcgtccagtaggtcacctccgtgccgccgtccttggtctcgacgaaagctcccttgacgatggaaagcgagtgcgttgcgtcgtccacgcccacccacgaggttccgacgagcgattcgatgccagagctcgcttcgccgtctgcagcatcggtctcggactgagggttctctactgctgcctcctctgccgattcaacagcagcccggccttcagtcgacccgttttgggcgagcgtgcaccttgccacgcccgagcccacgaggagcaccgcagcaacaatggccgcagcgagcatgagcttgttctttctggtcatgtttcgtccttcctatctaattttgatggcgctcgcgaactgcgacgcgccgcttgcaatcgtgcaggccgcgcccgagtgcggctcgtggatgtagcggtcgtccccgatgtagatggccacatgcccgggcctccaaaggatgtcaccgggcgatgcctcagacaccggcaccttgcgaccgaacgccgcctggtcctcggagtttcttgggatggcgatgcccgcctgtcggtagcagtattgggtaagccccgagcagtcgaggcccacgcccggcgtcgttccgccccatacgtagggcacgcctagctggctgtaggcggcggcgatgaccgcgtctgccgagagcgccccgctctcaaggtcctcgactgtcatcgagtcgaagcggcgcaggttgtaggtatccatggcggacttgagggagtccacgtaagccgagctcgttgcccatcccgcatccttgagtccctccgccatcttgtcggaggagcgctcggcgatcgcctgctggatgagggcattggcgctgtaatgggatgcctgcaggaacacgcggcttctgaagcgaatgcactccacatctcctttgaacaccgtgaagtacgccgtaatggtggtgaaggtgccgggtgtgtactcctcttgggtcgtccatcccgcctttccggcgacttccagtgctgatgcgaaagacgacgcccatttcatcccgaacaggttgtggtcacgtgtcgcgagctggctcatggtctcgccctgtcccgactcgcagatgatctgcgcgatggtgcacccagcggggtgaccgaactcctcctggcagcggatggcctcttcgaccatctcgtaggtgatgtagggcggaagcccttccatggagcgcttcttgtcctctgcatcccagaacccgaacaaggccgagataatctggcctatgacgagcgctactagcacgaaggcgatgaccccgcagagcaccccaccgcctgcggcaatcccgcttccgcctaccgtgccagcgacggcggcgttgccggacgacgaggcggccgtcttcgcggcggctcccgtcgcctgggcggcgtggctcgcttgcgtatggctgactcctcgggcgcttgttgtcttcgccttcttcgtgccctgggcgctcgtgctcttgatggcgttcgcgctcgatcccttggagccgcctgaggcggagagggcccctttcgccttcctgtcgcgcatggctgcgattgcccgctttgcgcctcgttcggtgtcgtaggtgctacccaccccctcgaactcgtctgtttcgtcgagctcggagacggcttcacgttccaggaactgacgaaccttgagccgttcgctcggagtgctggatgtctcggtttttgaggatgcctccccgacacccgatgcgccatcggaatccgcgttaactgcactcgcatctgccgacttgcgcatgcgcctcttggagggggccgccttgcacgttgccctcgtgccgagtgcggactgtttctcgcttagggcagagaggctttggctctcgtcgtccttcacgattcccgcgctcacggcgtcgagcttatcggcggtgacgatgtccgcgatcgaggcgctcgtgttgtcgaggcttctcgggtccatctagctccggctcctcttcgcgttcttctcgaagacatgggctcgcttcagctgtgcgatctcctcgggcttggtgttccagaggtcgtagagcgcgcctttggggaagtcgtcacggatgggcacgcgcgcccctcccgcgacgagaaggccctctccggccttgattgactcgtcgatgtactcgcgctcggcaccggagagcgatagcatctccgcccacgcggcgagatcctggcttgcctgcttgtgaagcagcatgaagtctgagttcagaaccatggtgcgggcgcgctcgtgagtgagcatgtgcgaggtgttctgggagatgccggtgcaaatcaagttaaacttcctcccttccgcccagaacttcgcgaagtaatcgatgatggtggggtggccgaagagagactggacctcatcgatgtagagccaggtggtaacgccccgatcgaagttcgcatacatccggttgcgcacggcctctaatgcggtgagcatgccgaacacgcgcatgttggtggagaggtcgtgaaggtctatgttggtgatgcggttgtggaagccgacgttggactggcggttgaagaacgacagcgcaccggtgacgtatcgctcgtagcgaagggctatgtcgcgcgcctccgcctcaggctgctcgacgagtatctcgtggaaatcggaaagcgtcggcatcccctcgccgcccgagcatctcgcgtaagccgcctcgacgcatcttgtgatgatcgacttgtccgcctcgggaaggccttcggaagactccgccatcatcgcgctcgaaagggccaagaaggcatcgatcttgaaggcgagctgcgcggcgtcggcgcgcccctccacatcagccaaatcgaagggattgagcgcggtatccgcatcgggcgcgagccggacgttcacgccgccgagggcctctatgagatttccgtactcaccagcggggtcgaaaatgatgatctcgtcctccggataggcgagcactgtattggtgatctcgcgtttcacagagaaggacttcccggaaccgggcttgccgcagacgaaccccatgggacttgcgagcttcttgcggttgcagatgacgaggttgcccgactgcttcgactgcccatagtagcccccgccctcctggtttaactctaacgatgcgaaaggcatctgcatggcgatctgcccggttgtaaggtagcgggtgacatcgacgtggttcatgccgagcggtagcaccgagttaagagcctggcgctggcgatagtaaagcggctcgataccgagcgaatttccctgcccgacggagatgatctgctcgacctggcgctcaagcgcatcaacagtatcggcgtaggtgtagatgaggccggtgtaggtaaagaggcgctcgttcttgttgcgaaggaagtcgaggagctcttccgcctcctccttggagtagcgcagctccggaggcaggatcgtatagtcgtagcccttcttcatggcgctcatctgctcgtcgattatctccttgtccatccagtcgagctgtcgcttcacgagcgcaagggcgtccgattgcgcgatgggctggatgtgcaggttcaccgatagcggcatgggaaggtcgatgatgttcgcgaggtagtggtcctcaagcatcgatccgaacgtgcggatggaaagcacgcagccgtatgtctcgtcgatcctgaagatgtccgagcgtccgctgggcttgaagtccacgagcgcgggggcgatcaggtcgcgcgtccttgtgttcgagcagggattcaccttgtcccatgtgaacgtgaacgctgccttcggacgaagctgggagtggatcgcgctcaagcgctcgatgccgttcagggcatgcgcctcgcagcgtatgcgcgagagcgtgccggtgacatcgcccttgatgcgggagagcttcggcactgcctcccacacgtcgcttgcaccgaccatgtaggtgaggtagcgatggcgcgtgaggttggagacgccctctcgcatcttgtcgttcaagatctggttgtattccttggcgtacttctctgtgtcggtacctgccgccttgaagaagcgcttcttgccgatctcatcttcggggatggggacgttggctatcgtgagctggacgcacgagtccgccccgaagtagttgtagagggaggagagcaccgtgaagatgttctgctggttctcgcgacgagccgactggtaggagatgtccgagaactcgatcgtctgcgagaagaggccctcctcgacctgtgcgatgccatccttgtagatggcgtcgtatccgatgtaggaggttatgtcgctcgctgacgcccttgtcctcttctgtcgcttcagcttctcctcgtggaccttcttcgaacggtcggatttggtggacatgccgataagctgccgcaggaggcctgtctgggaaccactccgctcgcgcttggccttagccatcgctgcacgttcggttctgatgcgggccttggcgagacttttctcattcttgagcctcttcttgtcctctttcatctctttctttggcttccttgtattctctggttggctcattggcctccgctcctttgcgtttggacatcctcttcgccctgcgacttggcgccccgcgcttgatgcgcgccagatgcttcggtgccgggctctcatagaggagtctctggtctttcagatggtgggaaaacagaaggggtgcgaacttctcagcgcgcatcccgaagggacgccagaaaccggcgagccagaacgggatcgatgcgcacatgacggggaatgcggcatcggcgacctcaatgccgatccagaaatggcagatcgccgccacgaggatcgccgatccgaagcctcccgctacgcacacaagggtgcggaaggagagcttcccgacgatcttctcctcgtattctccgatgtccttctgaatggggatctgaagcgacatggctcaccgcctccctaggcggggagccaggacgtgtcgagcatcccgaagtagaccgctgcggcgatgatgatcgcgccgcccgcgatggtcgatatcgccgaggcgatctggctgcctccctgctgctccctgatggcgagtccgagcgacaccgcgccccagacgaccagaaagccgccgaggaaggtgacgcagccagagacaaggctgatgatgtttgcgagcatttgccctcctttgccgtctttcgcgctaccgccctgaatgtggaatgggtcggttgcgccccgatgatagaattgggttcgcaggggcgcttgcgcgctcctttgcgtctttcggctgcggcagcgtccgggtgcgtggaatcacctaggcgtcttggggatccgccgatccttgccgcagccgcacatttcaggtctccatcagctctccttcccgtcgggcgcgataccgtttgaattcgaagggaccggatttctcggcccttgccagcaaagatgcgcggggatgcgacgaaagcacgtacttcttgtccttgaacgcctgagccccgtttatgagcacgagcgcctcgtccttgggcatgcgtgagatctcggagccctgcatgaggtctcgctctatgaggccgtagttatgtgtgtaggtggggttgttcccacgagagtcgttcacggagacgttcgctaccgtctgcttcccgatcatctccgcaatcttctgattggtgtctgccgacttgcctcccaggtagagcatcgtgtcgcaggcgttcacaatcgtcgccgcgttgttctcgccgtagttctcgtcgagctgcgagagggattggcagatcatggacacggcgatgttgcggcttcgggtgaccgtgatcatccgctcgaaatcggggatggtgccgatgttcgcaaactcgtcgaacacgaagtgcacgcatctcgggagccgtcccgcgaatcgcttgagcgcgcactcgcagagggtgtcgagcgcttgttgcatgagcagcgcgaacacgaagtcgaaggtggagtctgtgtccgacatcgacgcgaacactgcgacctttacattagcgtctcccatgtggtcgagggccatctcgtcaaagcggagaagctcgcgcatctcggcgatgtcgaagggtttcatgcgaacgttgcacgagatcatgatggatttgagggtcttgcccgcagccactttgaactgcttgtagctcgacagggcgaagtcgtcctcgggtcgcacgggctctgccaccttgacccacgcccaatcgcccgtgtccgtggtgaatgcccgggagctcggatcgaatgcgcggccttctgacaccttcatgagacgacgccccgtttcgagctctttgaacaacatgtcgagcgggctcaggtacccctcgtcgtcctcgcgcgcatccgctaatgcgagaagggagaggaggccgggtatgttcctgtcctcctcgggacaatggtcgagaagatatgccacaagggctgtatagaggagcttctcggcgttcacccagaaagggtctgtcgcgctctcgccctctgctgtggtgttcctgatgaggcattcaacgaagcgcaggagccccgcctcgtccttgatgtatgcgatggggttgaagtgcatggagcgcgagaagtccacggtgtcgaacgtcttgatctcgtatcccagccattcgagcacccatcccatatcgtggatgagcgttcctttgggatccgtaatgaagaagctcgcgttggcctgcatgaggttgggcttcacgtagtagcgcgtcttgccggtgccgggtcctccgacgacgaggacgttgttgttcgtctccgtcctctggtcgtgagaggtgtcctccaggcgcttgcgcgcggatgccgtgaggatgatgttgttgtcggggtttcccttgtcggagaaagcacccatctcgctggccgtggcccaacgggcgctaccatgctcctcgcccttgcggtaacttccacgccgttcccaccatcgcacccatacgagccatacagcgcacgcgcatgccgcgccaacgctcaaggggaggggttcaagatagatcacctgaccttgcgataaccgaccgatgaaggcgtgggcaagatttaactggccatttcccgcctccatgacgagccccgtgcagatgttgcccaatatgaacagagcgagggacatgagcccgatggcgagaagctctcgcctcatcgggccttcacctcgatgcgctccatctcgtgctcggtcttgcttgctgcctgatacgcatggctggcctcgcgggcagcggcggccttctgctcaaggggctctgcgtcgcgctctgcgctcagatcgcgccctcgttcctttactgctctctcgcatgccgcgtcggcgtcgcgttcgagctccttgaaagcctcgtccacctccggcgcgtcttccaccttgaatatgaggtggtcgtgcccatcgatgctcgcgatgtcgtgctcaatcgcggcagcgtcgagccgggcatcgatgatctcgcgcaggcttgcgtagtcgggcagctcttcgaattcggagaggttcaaccgtgcgtaatcccgcacgctctcgtgctccgcttctgctaggggctcgtcgatctgacctctaaggtttctgatggcatttttgagcctctcggcgctcgctcggatagcgtcctggcttgcgtcttggcccatcctgagcatccagtcgaagagcttctctcctgcctcgtcgccataatcgcttgccatgatgtttgcctcctaatctatctttcgttttcatgcgtctgctccgcatgttcagttcgcacttggttctcagatgcgatgacggcatgccttgctttgtcagacagcccttgggcgtccgggatcatcgcagccttctcatactggtctgccttctcgaccgctgctcttagctgctctatcaatgtgccgaagttctctgaatcgaggccttcgagcaggccctcctgggccgtcatcgagacgccgcgccctattcggcttgcaacgacttctagctcgaaattctcgcctcgtgccctgacgtagccgctcgaatcgtcggggaaggcctctccgtcccaaacgagagaggtcttcggcagcgagtattcgaggcgcttgcactcctctggcgttgccagctgcatgctcgcgatcgcacgcgtgaaacggctcatgtcgggcaggatgtagctcatggtgtagctctcgaaagcaagccatgacccatcggggcatctcttcagcgtccaccattcgtcgcccccgttgacctgctggatgaaggcaaggtcaccgaagagcacgccttggcggattgcccagttaccgtttgagaaaaagtcggcgaggtctttgatcgtggatgcgcgggagaagtcgtatggatactcttcgagccacggatcgtcttgccaatcgaatccgcctcgcttgagccatccgttcttctggcacttctcgacgagcgagtcgtgctcctcttgggttgccggtgtgaggttgaacatacggtgcgctccttgtttgccattcgatggcggcggggcgcatgtctttcgagccaagccctgagggggtccgagttagttgtgtttcgggcgacctgcatctccccgccgctaatttgctttatagcggggaggcaaggcgattgcttgcgtgaggctattcggaaagttcaactaggttctataaggtttactggatcaagaaagcaagattgaatgttttaagagaagtatgccgtaatagcggatgtcaccttgtcaggagaaatctcaagccaattgttcttcgctcgcgaaagctcccttttgaatctgcggtcaccgaacacgcgagaaaggcgattggctatgtcaccgtaacttctctcacgcattgtcggatcttcgataacaagggcgcgaaccgcatcgtcgagctcacgttctcgcacaccttttttgcagagcaggtagtagatgtcgaagacatctttgtagcgggtggacgcagcaccgatgcgcagcaaggagcggagcttttcagctaccacctgctcgttgctatcggcgaggatcgtcacggcatcgtcaagcttgccgagatcgaagcatatttcggcaaggtctggggagacgaggttgtgcactcctatgtccaccttggtctcgatggagctcccttgggcatctgatatgacgacatggatcctcttgccgctgtagtcttggtgcttcagttgctctatcttgcccgtcatccttatcgagaatgtcgaagacccgtctgagagcgcgccgataaacttcctgatagagtcatcggctatcgaaaagcgcacgaagtccaggtcgaagtctgtggttgcgcggcgcgtgtcattggatacgtgctgcatgaggacgccgccttttaccgtcacgttgcgcgcgaggtcggatttggcgataaggtccagcatagcgtcctgggcggttcgcgcccgagcctgctcgtagacaagtccgtcggcaatgtaggagtctctgatctccgccaggctttccatttctacagaacctccctctggagtatgtcgaacatgaagtcattcttcttgaagagggccatgtagtcctcgacgagtgcgatgtcgagctcgtcggctatcttgcgataggagcttatgacctccttgtaatagtcgaggggaagggatgcctggcggcgcatcacctcaacgagcatgcgctcacggttgtacatgcgcgctgttccgccatctcgctcgacatccatcgtccccggtgtcaggagcgcatcctcggtgaagtactgtcgatatccaggccgagcgatccgtgtggagcttctgcttgtggcgagatgcacttcatcgggaatcacatcggtaaggtcgtgggcgtagagcgcgctgtccatggtaatgactgcctcgggatagagaacgtgcgcgagcaccagaggatccggatgctcgatcttcgaatatgccccacgcgtaagcttgtgcaactccttcgattccagcttcttcttcaagaggaaggccgatcctgcatctgccaaggcttgctcatatgtcatcactgcgttatccatgacgacaatagtattgtaatcactcacattaaacaagaccatgtgagtgattacatgaattaattttcatactgatctccgcaaaggagcttcaagtttttcgggacttcttgctatctcgtgccaagcgcgtgtttcgcttgaaccaagccatgagctcgccgcgctccgcaagggctccccttgctgaccagccatacatacgcataggcaacggatcttcttcgcgttcgacaagctcgtagtatttctgcttgctcagtttcaacagcgccatgacttgccttgagtcgtaataatcctggggcaggatttgccgcttctcttgtttgggactgtcttcgctcatggaactatctcgaatagatttgcaagctgatagaacaatcagctctcgaagctatgcggattcgtgctcagatcccgaatcgccttccagcatctggcatcgaggtcttcttggatcttctcgttgatgaaatggttgaagtcgagcttgaggacgtagcagagagcaacaagctcgtctgccttcatctctcggtttccgtgaagggtcttccagagggtcttgttcttgatgcctgcgcgccttgccagttcggtgatgtcctggccacattgcgagcggacttcgtcaatccttatcgatattagctcgattagctccatcctcgtctacctaacgcatccttctcattaatccaataggaacatttattaggctaaaggcgatatagatgctcttgcgattgtttccccttcagggtgatttatttcaccggcatggtgaatatttccagctccttacccttttctcactagtgttcgagaaacgacacagcgcttcgttttcgcaatctgggaaacgtgcgccgagccatacaccttgacactcaaatacgcatccgcctcgcaggcgcgaggcatacctaccccgaggcgtcaacgacgcgaacggggttttcgcatcgttgctccggatgccgacagaagaaaagattgtggcaggaagccaccttagcgagaggaggctgatatggaacatgagatagaagaagtcccgtacgacgagcagcgcttaagagatgccgaccccgatggtctctaccttttcatgctggagccttacccatacatgatgactccggatcaggtcgcagacttcaccggatcgaccggacaagagatcaggaaactcctgaacagaggagatatccaaggttgccgaatcggcatcaagtggtgcatcccaaagctcgggcttctcaactacctcaacaagaaccgaaaggcggtagatgaaattggggacgaagaagctaaagtgcgacaaaccgtatgacatagatgaagctcgcaagaagaaggggctcccgcgccgaaagcgttcagattcgcgcactacagcctacgagctgaccattcgcattccggaggaatatcgcacctacttcgataacaagaaaaagctcacccgagttgtgttcgcgctcaacaggaaggatgacctgaagtctcagattgagtcttttgagaacgagaagaacgctgaacttgagcgcaagcaagaagagcgtggatatgcacgccaaggagatgacagaaacgagccggggcgatgcatgaccccgctcggaagttatgccgaacgctatatcgacatcaggagcaacggctcagttggcaaagaaactatcacgagcgaacgtcgtctcttgcagtacgttgacgctgtgataggcagcatccccatctgcaaggtgacagctgaggacatagagggatgcatcctcaaggtaccggagctctctgagaaatgggcacttgagcgtagagcagcttgggaggagaaccgaaaaacggcacgatgggcaaagaagcacggtacacttgttaagccattcaagccaattaaggtggcaggacctggcatgcaggcaaaggtgctcaagtttctgcgcgagctcatgaactatgcgctggaaaaggatgacatcacgaagaacgtcgcgaaggcgaaattcctcacgaggttattcaagaagagcaagcccctcatcgatcccctcatggctgatgatgccgctagatttctccaggaagtggagaagctgcctttgggctatctcaaggtcacgctacttctccttctcaacaccgggatgaggccagaggaaatgctcgctatccgcgtaggcaacatcacctccgatggtaatgagaccatcatcagcatcacgagtgctctcgatcgcgatgggaaaaccatcaaggactatccgaagtcggacgcagggcggcgatcgttgcctgtggacgactatacggcagatactgtacgagcatggatagagctcaagtcggagatgatgaggaagatggggctcaagccctccatgagtatgctggtctgtggccctgagatgattcctcgcacctatcaatcctggcaccgagattggatgcgatttgcggcagaggcagggtttgagggggtgcggccttatgccctgcgtcacactttcgcaacgttgaatcttgcaaacggagagaacataaagaccgtggcggtgcttatgggccatgccagctctgcctacacactcgacctctatgctgcctatgttccaaacacgggtatagggatcggcacgcgatacatgaacttcctacgggctgccgcttaaggtgttactcgtggggattccctgaaatgaccggcggtacaaaggaggtaaggttataatggattgccaatgcgggcgtcgtataatggttattacggcagcttcccaagctgctcacgcgagttcgattctcgtcgcccgctccataaacaattgtgtcggaagtcgcctctttggcgactttcgtatttcagagtagaattgactattggttagaaaaccaatcgtttttccagtatttcgtccagtacgtttgctagaattacagtattggttttaagaacagcgaggtcagacggttaattcgagtcgcggaaggtcgggtaaggaataagcttcccaagctgttgcactacttcgtgcgatttctcttgaaaagcctttctgacctcgtaagattttaataccgtattccattgtaccaagcgcacgggatgaaaaacgggaaatctcgtttcgttttcatttgaatccaggatgagcatatgatgcacgaaagccgccacgctgacggctttcgatattgacggttggagcgggcgacgggactcgaacccgcgaaatcctggcttgggaagccagtgccttaccacttggcgacgcccgcatcctgtcgaattatacgtcatcatgttttgctcgcttcgcttaatacggaaaaccataatctcttgccgaggaacggatgtattcgatgtatctattgcctataccaagcgccgtattcgggacatagccagcatacagatcaagggtataggaagggctttcgtgccccattagcaccgataccgtcttgatattctccccattggcgaggttctgcgtggcataggtgtgcctcaaggcgtaggggcgtatccccgagaacccgttatcatcgatgaacttaacccattgcttcctccaggtgttataagcgtaaggcttggggccgttcgacatgagtggcatcctcatagtagggagcagccccatgtcctcgatcatctgagacttgacggcaatccacgactcggcggtatctgtcaaaagcgaatcaatgggtatcgttcgtctgccagcactggtcttggggtactcggtgatcaccgtgccaccatgctttaccgcccccgtcacgcgcaaggcgctttcgatgtctttgaacaagaagcttcccgcgcatatcgcctgcatctcttccggtcgtataccggtgcagaacagcgacagcaagctgagcttgaaccaagacagcggcagcttctcgaccgcctccaagaaccttgccgcctcgtctgccatgagcgggtcaatgagaggcttgctctgcttgaagactcgactgaggaatctcgcatgggcagggtttcttggggtgtgctccttgtccagcccgtagttgtacacctcgcgcagaaacttgagaactttggcctgggtgtccgagcctgccacgcggggctctttgaggggcttgacgagagtcttcttctcttgagcccacttggcggtcttgcgattcttttcgagcgccctcttgcgctcttctgcccagagtctggaaaggcgagggatggcgattagacacccttcgatgtcatcggctttcacctcgaagaagaccatcccgcctatagttgcgttgatataacgcatgtagctcaattcgttcttgatggtctccaccgacaccgagccatgactccttacctcgatgtatctctcagcgtattcagtcagggtggcagtgcagtaacccaactcgtttgtgggcaaagcgccggtgtctttcccgcatgcctcaagggatttcagatacgcctcggttgcttcgttgagctcgatgttcttttcgtcttcgaacgccctggattcttcttgaagctcgcgacgattgagaacgaatgctcgcctcgtgaacttggtcttgccatcaagatagatttgataatccactggcacgcgaatggtcagctcgtaggcagtagtgcgtgtgtccgcgcgcttgatccgtggtagacccctgcgcttacgcgcctcatcgaggttatagggcttatcgcatttcagtagtgtcatagggctcgccttcttccttttggcgatccttgtagagatagttcagaagcccgagcttcgggacgagccagcggacgccgatgcggcatccctgcatctcgccacggttgagcagcttgcggatttcctgtcccgttgtgccggtgaatgcggcaacgttgtcgggcgtcatcatgtagggatagtccttcagcatgaacagataaagcccatcggggtcagctgccttcaaccggttctcgtcaatctccaaatcgccgtagttatcatccatatgtgcctcctctcgatttttcgaggcgacatcttgccgcctatgtttgtcggtttacaagcgtctctcaacgatgcgaattggcgaatcgcaggattgcgaaccacacctatacatggatatgagagcgcgccttatagacaaatggatacagttttcaagttgtggtctgatcgcacttgattcgcttatttcgtaaaaaacgcattcgaacatcacgaaccgtagcagcagcaagaaccgagcggcggcgttggttttacagaaggaagaattgttcctaaattaagaacgattgcgaattatccggttgttcaacatggtatgtatgcgttcaagtacgtacgatatacctgaatgaaaagtgcgtttgttcggggattggagaaatcgttgcttcagtagagaagagatttcttgattagtgcttcgagtgcttgtgtatgcgaatccgagtcgttcaagcaagaaacataggtgaattgctcagagtgatatgcggcaaggaaatcctgcctcagcgacacgtctatgtcaagcagcgtctccaggcaatctaccgagaagttgggcgcgatcacaaataggctactgtcgttcaaggtcgcatcaagttccttcagcgattcccttatgaagggacctacccatttacgattatcgaaacggcattggaagcctatgcgccagcgctcgggagcgatgtccagccgattggctatggcaattgccgtcttgtgcgcttgttcggcatacgtgtcgccggcatcgacgtccttcatggggatggagtggaaggaaagcagcaatgagtcttgctcggtaaagccagcaacgcgtaccgaggcagcgattgcatcgaggtactcgtcaaggtgccaatagtcttgcacgaacgagacttcggggctccagcctaacgcatcgagaccgcttcccaatttatccaggacgacccccgttgtagagaacgcgctttgcgggtagagcgggataacaacgagacgctcgcacccagcggatttaagctctttgagcgcatcgctcatcgacggcgcgccatagctcatggcgcagcgcgcaatcacctgatttcctagatggcactcgagcttccgtgcaagggattccatgcgaacgatgagaggtgaccctgcatcggtccagatggaggcgtacttctcagcggacgcgaacgacctcttgggaaggatgaaagcattcagtacgatattccaaggcactggatgcataggtcggatacgcgggtcagtgaggaactcctgcaggtaggctcgtacagcctcgggtgtaggcgcgctggggctgccggtgttcgcgaggatcactcccagttgtccgttcgaatccatatgctcctctcggggatcagaagggctgattccccttgaaccaatacaaggccgttcgaactcccaataggccgctcttaactccgggcgctccagcagccgagaccgccaagggcatcttccgtcatccttacaagcgcgcattgcggcggtactcgctaggggtcaccccattatggcgcttgaaggcagccgcaaacttgctgggattctcataccctacgctcaaggatgtagtcgcgacatcatagccttcggatagcatgatagcggctcgctcgattcgacgcctgcgcaggtatgcggcgacggtctggccgtaggcagtggagaagtagttgttcagtgtggttgcgctgaccccgaactcacgcgcgaagtcgcgaacatcgtggtgaacagatatgtcagcctccaaacactcgcgcatggtgcgcgcgagcgtcatctgggaacgtgtcagcagcataggcggctgcgccatcgagaggtccagatcgcagagggtgagaagcaacccgaggctctcgtaggcaagccgtgctgacccctcagcggcaccgaggcgctccattattccatttagctccgcattgcccgcgtatatcgccgcgaaacccgccttgcggacgctggcctcaaggtcgagatcgtttgcttggaggatacggaactgcgggtcgttgacgcatccggaatgggcgatgatctcgatgccccgatagcgccccaaggggtagcgatactcttccggggcggtgtcggagcagctcacgcagaaatcacccggcttgacgatggcatatcccttacctgcaagcgaaacctcgcagcggccctccaggcagtggttcacggtgaatatggtgccgggctccctgaatccggaaaacgccttgtcctcgaaggggaggctcgggcatgactcgcaggtgaaatccaccgttgcgaccgcgacgtgaggggaggcgaacctcgcctgcatgctgccctgaccgactggctccccgagccgaagctccaaggcatcatctgagatgcttcgcacgcacatgcccaggggcagcgcgctcaactttcggtttcgcatagtggcacctcgcttctgcttgagctcccacccctctgaagcccttaggttagatagcacatgaacatcgagatggcgattggctagaacatgcgcgtgagaagaataccagaatggcgatggttgttaccataggtaaacttattgagatttggattcattctgatgatatggagttgttgaccctaacgcgccttggatatcctcctgacattaccatcaacatgaaaggagaagcgttggccaaactacacgaaatcggcgcgggccaatcagcgcgcgtctgtcgcctcgagggtgacgcgcgattcctctcgcgcatcaccgcgatcgggctcacgcaggggagcaccgtgcacgtactccagaatgcccgtaagcgtcctgtgctcgtacacctgcgtgacagctccgtcgcgttcgaccggagcgattgcgagcgtatcgaggtggaggcgctcccatgagctgcgaggaatgcaccctctgctcgacgggtacgctggcatgcgacctcggcttgccggcgcgctcggatagcgtcacgcgcatcgcgttgctcggccagcccaattcaggtaagtccaccatattcaacaggctcaccggcgcgcgccagcatgtgggcaactggccaggcaagacggtcgagcagaagattggcagcttctcgcgtgatggccgcgcctacgagctcgtcgacctaccgggatcctatagcctcaatgcccagtctcctgaggaggccgtgacgcgcgattacatcgttgcgaacaacgccgacttggtgctggtggtcgtcgacgcatcgcagctcgagcgcagctgctacatgcttgccgactttgccggccttcgctgtcctgccatcctcgtggtgaacctcgtggatgtggcccgtgcgcagggaaagaccatcgacgtcgccgccctcgagcggcgcctgggcatacctgtcgttcccctcgtggcttccgagaagtcgagctacggcccgctgctcgacgccattgccgatggagggtgcaagtcatgcgttgacgacatagagctcgacgcgattctcaagaggcatctcgggaaccagctcgatgacgttgagaagcgccttcccaaagacggcatcggggcatcctcgcgcacgtggctcgcgacgaagctgatcgccggcgatgagggcgtagccgctttggtggagcagagcatccccggcaaggactggcagcagatcgagggcatcgccaatcacatccccgatgggatccaggaagtgagcggggcgaagttcgcctgggttgagcaggtgctcgacggcatcgtgtcgggagaggcgcaaaccccgcggctctcgcgcttcgaccgcatagccaccggctcgcgcgcctcggtccccatcactctcgcagccatcctcgggggcttcctgctggcgttcgtccccgcactgcccatcatgggcataggtggcgccatctcctatgcgggcatgatgctctcggacttgatcgtaggagccggtggaccggaattggtggggagcttcctctcgggcgtggtctgcaacgcgctgtgcttcgcgctcatgatggtgggctacgtcttcgggatcaacctcgtgttcggcctctacgaggacataggctacatggcgcgcatctcctacgtgttcgaccacgtcatggcgaagttcggcctgcagggaaagtcggtcatgccgttcctcatgtgcttcggctgcaccatgggaggcgtttcgggctcgcgcgtgatcgactcatggggccagcgcatgctcaccgtcgccatgagctgggccattccctgcggctccacctggggcgtggtgccggtgctggccatcgccttcttcggctggggagccccgctcgtcatagtgggcatcttcgttgtatgcatcctgctcatggccatcatagggcttctgttcaaaaggaagctcatccccgagggcgaccgtgccgggctcgtgatggagcttccgccctaccacaagccccatgtgaagagcatcttgcggggagcgctcctgaagagctgggccatgctcaagcgcgcgttcaaggtggtcgcggtgttcgcgctcgccatctgggcgctcacctactcgcccacgggcatcgaagggtcgcttctctacatgataggcacagccatcgagcctgcgatcgaggtgttcggcctcacgtgggagacgttcaccgcctgggtctgcgcccttgccatcaaggagtcggccctgggcgtcctgtccggcttgttcgccgatacgggaacgataggccaagctgtcataggggccgtaagcgggagcgctgtcgtcgcggggaacctcggcgagctcatggcgctctccatcacgccaccgcaggcacttgccttcatcttcgcgttcacgttcaacatgccgtgcgcggcgagcgtgtcggcaacgttcggggaggtgcactcagccaagtggacggctatttgcgccgccttctacatcgcctcatcgctgatactcgcgtttgtcgtctaccatgtctcactggtgttcttctagaatggccagctggctggctagtctgcgataggcccgatagcaatgtgtgccgcagcccctctctctggagttgcggcacacgtcttctcagcagctgcatggcgtgatatccaaagcgtgaacagtgctacgtcccctgtttacgctttggatcaacggcagctactcttgcgctttcaaggcgacttcaagcggaacctttctgatgtgcctcacgtgaacggtagcgatggctgcgtagcatacgatgccaacgcccaccgcccataccagctgcatggcgggtacgacgatctcgaagttcccgttgtactgcatgaacacgatcccaacgagccaggtgaggaaggcaacgatgatcggaaggcagagcaagagcgatacgacaaccgcgatggtgatgggccgtatgtagagcgagttcacttcacggaagcgatacccgaacaccttcatgtacgagatggagcgtgcgctgcggtcgatcaccgtcttcgtcaggaggtacatcaggaccacgtagacgatggcggccagtatcacgatcatgctcgttatcgaccccatggaatcggtcatctgatcgacgatcttgcccatctcggcgggggtgaggtcgctgagcagatacaagtcattcaatgcgagctcggcatccgaggcgtatccgttgaagtagccttcctcgttgccgaaatcgtggttgaacgcagcgataggcaggtagacgttcatgttggaggcgctccccgtcgtgcctgctaccatccacgtgtgctcctcgccggatatcgggtcatgcaaaacaacctcatcgccgctgacgatgcggcatttctcggcgagcccgcgcccgatcacgaccccatcctcatcgaggctcacatccttccaataggtggatgcgggcacgatgccgtagacgctcacctcctccatgcccatatctgccgggcgctccacctcgagcgtcgccaccgcgtacttctccgctgcatcaatgttcgactgctcgttacgctcggtattccaaacgacctcagcatcggtatccactcgggccgcatccgaatagagctccattagatcgagctcatccatcgactccagctcatcgggatccgtcgtggcgagcacctgtgcggcagcctgagcctcctgctcctcatcggtcacatctatctcgacaggcaccttcagaacgtactgatgcaccgccaccaaatcggatgcgaggttgtctgcgtggttctggataacgggcatcaggcagagcccgaacaccagaagcaggctcgcgaaggtgatgccgcagaacaatgtgaggaagctcggcaggttgcaaagcagaatacgcaagcggaagcgcgacgtgaacgagagccgctcggggagcgcgactccgcgtctgcggctcctgcgcgtggtctcgtagcgcaggaactccaagggcgtgcagcggagcttgcggagaagcccgacgaagctcacgaggagcagcaatgcaagggggatgacggtgcatatgatgaacacgcgccagttccagaaggcttcgtagggcggaaagctgtaggaattgtagtagaggtcgcgcatcggcgcgtagagcacggtgtatccgataacgttcccaactatggctgcggcaatgcccacgaacgcgggaagagccatgtagtgggcgatgagctcgcgcttgcggtagccggaggcgagtagcgtgccgatcacggcgctttccgcctcgatgttggcccctgtgatgatcacgaagacgaacgccattatcgcgatgatgagcacgagcatgacctcccacatgatctggtcgtggcgcacgtcctcgcctgcgtagtggatggcgctgttggagtcggccgtcatgagggaagtgggtatcgcgccgttgtctgcaagcgcatcggcgatgtcttccagcaggctgctttgctcttcgcgtgttaggtcgttcgcatcggcgcggtaggcataggtataggtgataggcgaatccagggaatcgaacccggcgggcgacaactctcccacgcagaaggtgagcgcgtcgaacatgaagtctcctgggtcctcgaagagcgccgagtagtcgggcagcgtgcagatgccactcaaggtgaagctcttgccccctatcttcacttcgtcgcccacctccaagtcgtggtgggcgcagaagacgcgatccagggatacctcgtcagcatctgcggggggcgccccttcactgtagcttgcaaggtcagcgtcgattctctgctggaacaagcgggctgtgatggaatctgcctcttcaccaagcccttcctctgtaagctccagctgcgcctcacggctgaactcgggagtcacgctcactcccagaccctcgactgcgtctatggcttcttcggatgcctggaaggcggtggtgaattgtccgtcctgcatgcagtagcgctccggcatctccgcgaagatgcgctcgatggacgaggcggctacgagaaatccggagacgaacgcgatggatacggcgatgagcgcgaatatgccgatgtagcgcccggcgttctgggcgagctgtcgcggcaggcggtgtgcaagggggctcgccatgcctaccactccagcgtgagtgccggaacgcgggcttcgttaacggcgtcttgcaccaacatgccgtcatggagccgcattatgcggttcgacatgcgggctatggcatcgttgtgcgtcaccacgacgattgtgcagccatagtcgcggttcacgcgttccatcaggtcgagtatctccaaggaggtctggaagtccaaggccccggtgggctcatcgcataggagcagcttcgggttcttcacgagcgcgcgcccgatggcgcatcgctgctgctggccaccggaaacctggcgtgggaacttgcggcgatgctcccaaagcccaagggattccaggaggtcatcgagtgggagcgggttctcgctcagatgcgcgcagacctcgatgttctcgcggatcgtgagctcgggaaccagattgtagaactggaagacgaagcctagctctgcgcgacggtattcgccaacctccttgtctggaagctgcgtgatatcctggccgtccactatgatcgagccgccatcggcgcgctccaggccgcctacgaggttcaggaacgtggacttcccagatcccgacggccccagcagagacgcgaagtcgcccctctcgaggctcgtcgtgatgcccttcaggacctcgacacgggcatctccctcgccatagctcttgcgaacttctctcatcttcaagaacgacatccatccactcctttgctctgttgcaagtgattctttaaatagatcggttgattgccgtcgttaccaaaacatgaagaggcggtcgcacatgacattgtgcttggcactttgtcatgcgttctgaaatctttgcttccattccgatggcgacatcccgaactcgcgccggaaggcatcggtgaagctgctcgcatgggcgtatcccacggcacgaccgatctctgccgctttcatgtcagtcgtctccaagagacgtcttgcctctgacatccggcgcgctctcagatactcagccacacatgagcccacctgctcgcggaatacggcgcataacctggtctttcccacatatagctcgcttgcaatagactgaagcgtcaagttctcggaaaacctctcatccattatcatctgcgcctcgcgagcaagccttctctcttccgatgaatctcgccagggatccgcagcggcgcatctagacgcatcatccagggcgcacgccagcacttcgcgcagcttcgcctcacagaacaatccaccaccggctcgggtagcccaggaagggttgaggctttccagggcgcatccgatctcgcgggagtgcgtgttcgtgtcgcagcagcatagatgatcgataagaaggcctttctcatcatcgcttattccctcgaagtcatcgaagaaatctggggtcatgcaaagcgtataggatcggtgtcgctcgcccgggttgagcgtgaaattaaccgcgccgccttcttgtcgataggagatgatgtttctgtcgcgcaggtaccgggagttcttggggcagagctttgcagatgagtcggtcatcgatgttatgcaaatgtagtcaggggggatttccgtaagttggatggcttcgttgaggtgaagatcgtgaaatgtgaacaggcatttgtccgtgatgctgtgcgcccaaagcaggccttcgccccattcggcgctcacggagctgagagagccgaaccttgccggatgctcttgaagtcctagctgctgcatctgcggcacgaaaaacgcatgcagatcatccgctacatcacttaacatatgttgcctccttcacttacgtggagacagcgaagcgttagctctacagttgagaatggattagctttccgttcgtatcgcttaccttcgcgtccgtactctatcgagtcaggcctgaatcagcctcttttccgcacataatatcctaggaaagtttaccttggttaccacaccttgggcgaacggtatctatcagccagaaaggaacgtatctatgaaattaatgaaactggcatctgtgttgtttgcaggtgctttagcgatgagcgcgcttgtcggatgcagccaagcgcagcctgcgaatgattcggcagcaagtgaatccagctcaagccaaagcgcggtcacccaaacatccgatgtcgaaactgaagcgaaacagcttttgagcgatttaaccggaagctaccaagagttgtttccagtactctttgagtcggagtacgaacagctatggatagatgatactgctgcgtctgttggcgaagccgaggctcagggtgcggtcgaccagctccaagcgttcataactggcacgctgtctgggcaagaggcagtggagacctacggagaggaaggcggtcctttcgattgtagctggaagtatgatctcgctgagctttccattgatggcgaagaagggatgatcagcggtacggacgcgcagggcaaacagcttttcgagggtacttatcgcttcgtcgatatggatgagaacttcttcgtattcgaaagcaatgacgtagataacgcgaacttcaagtatttcgcattcctaccagatacacccgcgtccacctatcatatcgagttccgttatggtgcgagtgctgagggaatcggggcgatgatggaaggtgagtacgcctattggaatgctgccggcataccgacagactacactcaaacgctcgtcgaagattgcatcaagctcttctgtgacgaaaacctagcggaataacgcgcacataccccccccctgcaaggcggccctgtttggggtcgccttttctaattcgttcgctttgtttagcgaatcgtccgctgtttcgttgttgaagcctttcttgaatgaaaattccgccaaacccgttaaagaaaaggaggaatcattgacaacagacgcaaaaacagaagttaaaccggaagttggatcaaaagcaaaaacggaggaatcgaagcttgggctcggatacttactcggcttcgccggcaggaaacgaggtttgctctaccttggatgcgctctttcagcggtttcgatgctgctcacgttcggaccctatatatgcatctggctcgtggcgcgcgacctcatcgccgtggctccggactggtcggcagcccataacttggcgctgtacggctggcttgcgttcgccctagcggtggctagcctcgtgctctacttcttcgccctgctctgcacccatgcgtgcgcgttccatacagccagcaacttgcgcaaggcctgcctggcgcatctcatgaaggtgcagctcggttatttcgacacgcatgcttccggtgccctcaggcgcgtcatcgacgggtgcgcgggatcgaccgaggggctcatcgcccacaagacgcccgacacggtgggttctcttgccatggtgattgggcttgtagtgacgctgttcgtattcgactggcgcatggggctcgcatgcctagtcgccgccgcgcttgccatcgcgtgcatgttctccatgatgggcggcaagaacgcccacttcatgcagcgctacatgcaggcgcaggtgaacatggccaaggcgggcacggagtacgtgcgcggcatccccgtcgtgaaggtgttccagcagacggtccactcgttcaaagcgttccacgatgccatagtcgagtattccgagatggccgagaactacgcggtaaaggtctgtgccaaaccccaggtgacagcactcacggccatcacgggcatcgccatcttcctcgtgccggtcgtcatattcctagcgcccggtgcgcaagcggcaggcgcctccgcattcgcgggcttcatagcgaatttcgcgttctatgccatcttctcggccataatcgcgaccgccatcacgcgactgatgttcgtgatggaggaagtggagatatccgcggatgccgccaagaggacccatggcatcctgagctcgccgatcttgagcgagcccgagcatccggagacgccgcagggtcacgacatagccttcgaccacgtcagcttccgctacgagggggcacatcgagacgcgcttgacgacgtgtgcttcacggtcccgcaaggctccaccattgcacttgtcggtccttctggtggtggcaagacgacagcggctagcctcgtgccccgcttctgggacgtcacttcgggagcggtgcgaataggcggcgtcgacgtgcgagacatcgatacccacgcgcttatggagagcatcgcgttcgtgttccaagacaatcggctcttcaaggagtccatctacgacaacgtcgccgcagcccggcccgatgccacgagcgaggaggtcatggacgccctttctgccgcccagtgcgacgacatcttggcgaagctgccggacggcgccgacaccgtcgtgggaactgccggcattcacctttccggtggcgagcggcagcgaatagcgcttgcccgtgccatctgcaagcaggctcccatcgtcgtgctcgatgaggccaccgctttcgcagaccctgagaacgaggcgctcatacagagtggcttcgccgaactcgctcgtggccgcaccgtgctcatgatcgcccacagactctcgacggtcgtgggcgctgacaagatcgtggtcatcgaggacgggcatgccgtggagcagggtacccacgccgaactgctcgccctcggcggcctctacgcacgcatgtgggacgagtaccagcgtgcggcgctctggcgcatcaagtcggatgcgccttcggaaggggcggcgatggcgcaaggccccgtctcggtggcagaaggaggtgtgagatgaagggaatgaaggagaagtacgccctcacagacgagggagtgaggaacatccgcctcggcgctttctggaccgtcgtcgtgaacctcgtcgctatgttcggcatcgggttcttcttcctgctgatgcagcagctcgtagagacgctgacgacgggagcgcccctgcctgacatcgtgccctatgcgatagggctggtcatcttcgccgtcgcgctctggacggcacactggttccagtacgactacacctacggcaagacgtaccgcgagagcggaaagcagcgcgtagcgctggccgagcgcctgcgcgagctgccgctatcgttcttcggcaagcgcgacctgtcggatctgaccgagaccatcatgaccgacgccactaccatggagcacgtctactcgcacgtgctgccgtacctgtacggtacgtacgtttctacgggcatcatcgccgtgtgccttctggcgttcaactggcagcttgccctggcagctctctggtcggttcccgtcgccttcgcccttttgttctggtcgcgccgtttctcggctccgctcatgcgcaagacccgcaagagcgcgctcgctatgacggagaacacacaggagatgctggaatgtgtccgggagattcgcgcgacgaaccaggtgggaacctatctcgagaaggccgacggcttcatagatagcctcgagaagacgatgttccgctcggaggtgggcgccggtattcccgtgcagctcacccaagcgatcatgcgcttcggcatcgccacgaccattctcgcaggttccctcatgctggcagacggctccctcggattcatggtcatgttcggtttcctgctggtggtttctcgcatctacgcgccattcgaccagtcatgcctcatgcttgccgagctgttcatggccaccgaggtcgcggcgcctcgcatgagggcgctctacgacgagcccgctgccacgggcataagcgacttcgacccgcaaggccatgatgtcgcattcgaggacgtgaccttctcctatggaagcggggacgagccggtggtgggtgatgtctcctttatcgctaaggagggcgaggtgacggcgctcgtcgggccgtctggatcgggaaagtcgacgctcaccaagctggctgcgcgcttctgggatgccgatgagggacgcgtgcttgtagggggcgtcgatgcgtccacggtggatcccgaaatgctcttgaaggattacgcggtcgtcttccaggatgttctgctcttcgacgacactatcatgggaaacatccgcctcgggaggcgcgatgccaccgacgaggaggtgctggccgcagccaaggcggcgatgtgtgacgagttcgtgggcaggttgcctcaaggctacgacaccatgatcggcgagaacggcagcaagctctctggcggcgagcgtcagcgcatctcgatcgctagggcgctcctcaaggattcgcccatcgtccttctggacgaggccacggcatcgcttgacgtcgagaacgaatcccaggttcaggaggcgctatctaaccttctggcagataagacggtgctcgtcatcgcgcaccgcatgcgcaccgtcatgaacgccgacaagatcgtcgtgctcgatgagggtcgattggtagagcaagggcctccggatgagctgctgagacagcaagggctcttcgcaaagatggtcgacctgcaaggtcgatcgtcggcttgggccctttaggatcgtgtgcgaatttcaggtttgctatttgaggagcgtcggggaaccgacgctcctcccatcttacgatgtccctaatttgaggacatgtgtgacttattcggggcgattattcccagaagcgcatcagtttttctattgtgctaatcacactactctgagaatgacaaaacaagcaatgcaagcaggcgatgataaggaatggaccacgcgaagctcatagcggtaagaatggaggaggcacgagacgcgcgcggcatcagtgtcgccgaacttgctcgacgggcctccatcgaccgcaagaggctgtggtacatcttagacggtcagcgccagatgcgagctgatgagttcgtccgcctgtgcgtaataatgggcttggatatgcagctcttccttacatctgagcttcgtgacgagcttgcgtggagacatcaaaagacgctcgaggattatggcagcggtctatgcggactgccgtcgctccgcgaaaagccatagtcgtgccacgctctcgggctttcgttagagcttaacggctcagtctttagcttcccaacacttctaatacatacccttctctttgcgtgaccaaacgctctatccctttgctacctctactctctatcgcgccctttcatctccttccatcgaaaggtttgacgaggacccgcacgaccgcaagggtcgcgaaaaactttcgcttggagatacctctacctacccatagcgaaactcatgggccctttgggttttcgcatttcccccttgcagcctttcgcggaaccccgtcgcacctccgcacagaaggcgatgccagaagggcagcgccgcaattcaaggaggtcgcaaaccatgggaaatcgagcagtcatcacgacaagagacaggaagctgggagtctacgtgcattggaacggaggacgcgacaccatccagccgctcctgaagtactgcgagctcaagggctatcggccacccagcagcgactcgtacgggtgggcgaggctctgccaggtcctcggaaactttttcggcggcacgacctgcgtcggcatctgcccctacacgaccgaccgcaagatggacccgggcgacaacggcatctatgtcatcgacggctggagcatcgtcgagcgcctcatcgcagactacgacaaggactacaacatcgtcggcatgcgctcatactcgccatccgaggagcaatgcgagtatggcttcgacgagatgctacgggtattcgaccagtgcatgcccgaagaagaccgcctcggcgaatacctcgacgcggttgagatccctgtcgctgagcttcagctcggcgatatggtctggatgcgcgaggtcgacgacaagttcaagacctacccggtcgtgggattcggtacaggcgctgtgaacggcgcggaacgcgagggtgtcgcatatgtgaagcacttcgaccaccacggcgattattcctggaacggcaacaactacccgcaaggcgagacgtgccgtatcgcgccccgcaaatagatcgccccatgcgccgctggctcccgtgccggcggcgcttccttcattcatcgaaacccatcagagaaaggaatccgatcatgggatacagaagcgaagtgaaaatcgcaaccacccgcgagggctacgagcgcatctgcaggcgcgtggacgagctgagcgcagaaagcgacgcctatcctctcatcggcacggaaatcaacccggacttcttcgacgaagccgacggctgcgtcgcgttcggctgggatcacatcaaatggtacgaaggcgacctggaagacgtgagcaacgtgtcgaaggcgctcgcggagatcgaggacgatgggctgcccgtggagttctgtcgcatcggcgagagctgggatgacatccagttcgagcgccataacttcaacgacgagctctccctgcacgtcgagcccatcacgtccatcgacgtattctgcgggtaagggggctaccatgcgcttcgcaaccatcacatccgtcgtcgaagacgataatcccatgcgcttcatcactgcgagcgccagcatctctcccggaagaagaggcctcgtgattcgcggtgtgacagactcggccgccgcgaacattcgcgaactcgtgctggaatctgccaggcgcgcagggcttcgccttcccgcaggggcaatcgctatcacgctgagttttgacgttcccttcgaggcaaccagcgagctggccctcgctgccttcgcgtccctcgccgaagcacttcgcgatgcctgcgccttttaagcgggctaggcctccaacctgatcgacgagcgatccgcgagctcctggtactcggggccgagccataggggtatctcctcttgcctcacgatgagcggcatccggtgatggatcggtgccatgtcctcgttggcctccgtcgtcaccatcgagaagctgttctcgcgccacgtgccgcctatcaaaatgacgtcctgtcccggaacgcggaactcgtactggcgcttgatgggctttcccgtcttctgcgatacgatcgtctcttctctgtgcgtctcgaagaacgccgagaccgggatgatgcagcggcggtgctccatggactcgcgccatgtcggcctcatcgcactctcgatgcgtgtgttgaacactatgctcggcttccacgactcctcgaatccccagatgagctcgcgcgcagagaggcttcccgcacccaaggtcggcgcgcctcctgccgtgtcgaagttcgccactatcaggggcgcggcggactttgggtacgcctggagccgccgtgctggccagtccggctcgaagttgaagggggcacccacctcgatctctcggatgatctcgagcacctcgtcgaacgtgaatatgatgcatcttccgcacatggccttgacctgcctcagcaaactcccgcgtcgggcaccttctcctcgacgaaccacctgggatcctcgtagaacagaagcgtctcccttccgcctatccgaacggtgtagcagatgccgtctccgcccacgcgcctcgatgaggcgcggcgcacggacaccacgtcgtcgatggcgtaggttgccccatcgtaccattggatggagagcgggcgcacgtgcccgtcctcgtccatgcgagccgtgacgctgacgtacctcttcacccttcccgagactccctgcaccattcacgccacctacctcaggaacccgatgggatgcacggtgttgtcgcgcttgatgtcgagccccgccatgacctcgtcggtgagctccacggccctgtggacgcacttgttgccgaagcggcggcgcagctcgtcgatggcgaggtcgagcctttcgagcacccgcgtcttctccgcatccccgaagaggtcgtgctgtaccgggtcgtacatggaggagaggctggtcgctcggacgtgtatggcgcggatggcgtgctcctcgtcgagcggctggttcgcccttatgagccccatggccgtgttcgctatgtcggtcgtgaggcatgtcggcgttcgcagggtcacctgcctggtgtatcccagaaggtcgctcgcgcgcctgatgccgatcgacaccgtcttgcatctcaggcgcgactcgcgcagccgctgcgagaccgactcggagagcagccaggtgagcgccttagcgtcggattcgcacacgatgtcgtggggtgcggtgaggccgtttcctatgcccttcacctcgtagtccacgtcggcacgcgcggggtccatcacgcggacggggctcgcgtcctcgccccgggcgaacgatcgcagcatgcgcccgatctttccgaagcgcttgtccaggaagtagtcgccggcatgggcgacgtcccctatcgtgtcgtatcccgccgagtgcagcttgcgcgccgtggcgggtcccacgtagatcatctctgaggcggccaggggccacgcgacctcctggtagttgtcccgtgatatgcgcacgatgccgtcgcctgggtcggtgtcgcttccgagcttcgcgaagaccttgttccaggatacgcccaccgacacagtgagcccgagctcgtccttcacccgctcggatatctcgcgcgcaatcagcatcgcgcttcccccgaacagcggaagcgatcccgtcacgtcgatccaggactcgtcgaggccgaacggctccacctggtcggtgtattcgtagtagatcatcctcgcgaggcgcgagtagcgcttgtacgccgcgtagtcgggcttaaccacgatgagccgggggcacttctgcctggcctgccatatcgcctctgccgtcttgacgccgcacgccttcgcctcgcgcgacttcgcgagtattatgccgtttcgcttcttggggtcgcctgccaccgcgacggggaggttcctgattgcagggtcgaggtgctgcgccacggacgcgtagaaggcgttcatgtctatgtgcatgatcgtgcgctcgggcatgcggcacctcctcatgatgggaacatttgttcgattatgggatattccatgatgcaccctcgcgagcgatccgtcaatcgaacagactgtggattttttggggcggcgcgcatccgggcatgacctcgcctagcagatccccgtgtgcccgcttccctgactgccccggcaaccccgctcccgatcgcgcggtcactgcagcacaccggccctttccgcgcacctagcaacccgcatcctcgcagccatccgcgcgcaagcgcaagggccgcgaaaactttttcacggcgcgatgctcttcccaagtccctgaaaaactccaggccctgccgggtttcgcttacccccttgcccccgcgcacgtcgcccgcgccttacgggcgtgcaaggcacgcgatagaaaggggcgatgcaaatgccaaggaccgcgacaagaacgagagcgaggcggggtaaccctccccagggggaggcgctgctcagcttctgcaggcactgcgaggctatcttccagcccggaagctcgccgattcccgatgtctgcccggagtgcgccgaaacgctgtactcgtgctgcgacaactgcgacgcctaccatctcacggaccagctgctcaccacctcggggcaccgcacgctctgcccgagctgcgcagacgggctcacctacacctgcggcgtctgcggccagcgccacgagacggccctccacgagccgtcggtcgcgcacgacgggctcatcgtatgcgacgaatgcctcgccggcttcacgcgatgcgcttgctgcgggcagctcttccgcaccgccgacacaaggatctcaggcggcgaccggtactgctggccctgctccctctacgacagcgatgaggccatccgctcctacggcttcaagcccgcgcccgtcttccgcgatgtccccgatgcggagcccacgggactctacctcggggtggagctagagatggacagaggcaacgcggaggctgccgctgcgcgcatatcctcgatgtacggcgatgacttcctctacttcaagcacgacagcagcctcgacgagggctgcgagctcgtgacgcatccgatgagcccggagtacatgatgtcggaggagggcaagcgcatgtggcgggacatctgcgaggcggcgctcgccgaggggatgcgaagccacgacacctccacatgcgggctccacgtccacgtgagccgcgacttcttcggcaagagcggcacggcccaggagatagccgagctgaagctcatcgagacggtcgaccgcctcttcgagcccatcgtctacttctcgcgacgcaagcgggatcaggtcaaccagtgggcatgcaggtgcgacgcccccaagaccgacgcgggctgggtggggaaggcgaagtcggtgagccgctactccaagggcacccgctaccgcgctgtgaacgtcaccaacccccataccatcgaattccggatcttcagggggacgctcaagccggacaccatcctggcgacgctccagtttgtgaccggcctctgccatctggcgaaggcgaagaacccgtcccagatggggcgcatcggctggtacgagctctgcgacgccatcatggacgcctgcccgaccgacacgaccgagctacgcgagtatctgatcgagcgcgagctcatttgcatggaaggagaatagggatgtgcatcatcgtctacaagccgaaaggcgagcaactgccgagccctgagacgctgcgcgcgtgctgggacaacaaccccgacggcgcgggcatcatgtggccggacggcgagcgcgtgaacatccgcaagggcttcatgtcctggagcgctttcgagatggcccttgaggaggtgacctcaaagctcgacttgaaatcgacgcccatggctctgcacttccgcatcgccacgcatggggacgtcaagcccggctgctgccatcccttcgcggtgaaggacagctacgagcgcatgcgccagacccgcatctcggccgaggtcggcttcatgcacaacggaacgctctcgggccttgagaccgacgacgcgacatcggacagcatggcgttcgcgaaggccgtgctggtgcctctgaaggccatgtgctcggacttcctgagcgacaagcgggcgctgcgagtcatcgagagctcgacccagggatcgcgcttcctgctcatggccaaggacggacgcgtgcgcaccttcgggcgctgggtggaagacggcggcatcctgtactccaacgagaacttccgcgagcgctactcctacacgccctcgctgttcggcgagacgccattcgacgcatggatggcctttggcggcctcgacggggatctgtcccgttactctatgttcgaagcgtgcaaggagtgcccgatgcttctcgaatgcgccgagtacctgcccgtctgcaccgacgaggtgcaggcatccgagatggtcgcgggctacacgtgatggcgttggtgcaacttttccaagcggactctcgcttactccttcacaacccatctgcctgatttgtctgagccctcgcgtgcaatgatcccgtgctctctcaaccctcggatggcgcgctgcacggagcgctcggacacgccgcataattcggcaatttccgcagcagttgcctttgggttttcggttaaccgcgccaacacttctgattcacgcctcgttaagtcggatctattgtttgccccgacatttactacgacatttaccccgtcatttactacgacatcgcctttgtcgcttgtcggggcatctatcactaggctcttcccgaaagcatcgtttctgtggaagatgagcttcgtgccacttggaacctcgacgtattccaccttgatggccgcctcgtcgcactcgtcctttatgcgcttgatgccggtgccttgcgactcgatgtcgccggatttgtagagcgtctgagcgagtagcttgttgcgagagacagacgatgcgtcctctcctgataggtgcgcttcggggtcttgcccctctatgaaccagccggggcttatgatctccagggcatcgttgaagagctcgaccatgacggccccgccccgctcccagtcgcgatgcgcgtaagcgttcatcaagccctcatgcaaagccttcgacggtatctctgggtagacgtcgcttgcgcctggccctgatgtgtccacccggctgcgggtattggagatgacgaacatctcggcgcttctcactaaatcgaataacgttccgctctcgtgttggagtccgattatctcggttctagcatgcgatgcgaagacccccatcttaaggtcgtctatgggcgagggacagaaaagcgctgcccctgcattgagcagatggtcgccctccatcaatccgagcctattgagcgcatcttttgcgcctgcgtactcgaacttgatgcgccccttctcgcgtccgcgctcgatgaatcgttttagcgtgggctcgtcgacgtccttgatcgtcttcgttgagacgcggctgtcccatgggtttatcctgctctcggaatccctgaagctcagccgcagctcgcgtggcgacatgagcacatcctcatcggcgactcgaatgcggaacttaccgttgcaagcgtaaggtgcgtcatcgccttcgaatgcgaccttcacgtaatccctgccgtcaggcgtcacttcatgtgttatctccggatagatgacggggtctatcgagttgccgatggcttggctgatcttgcgcagcgttgtctcggacacattttgcccgcagacctcgccgtcgttcctgacgccgaagaagagagtgccctctccatgcttgttcaggatggcggctatggactccgtgccttccttcagctctgaagtggacttcttgaactccgtgcgttcgtcctcatgtccaaggttcactcctcaccacctgcctcatcctcgtctatcccgtcaaacgaccctcgccagagcgcgtactcgaccttcgagatgccgcctcctttgagcgccttcctttgctcgttccatttctctaacgccatgttaatcttcggcgcgtgcggggcgtttgggttcacggctataacgatgccgtttttggtctccaccggctctatgccgaatccagcctcctccatcgtgaggagtgcgtccaggacatctgcgaccgagtcgatttcgcgatccttcagtgcctcgggaagcgctccgagcgctttggcaatggcggcaagtgtctcgtcgtcaggagtacggtagtccttctcgtagtttgctatggcgctctttgccttgccgatcttgcctgcaagctgctgaagcgtaagccctgctgccttccttgccctgcgtatgcgctcgcctgtggtcaagccttaccctttcgcccccgtttcatgtctcgccctattatcgctcatggttcacgtattcgtgcattgatgttcacgggcggctgctgcgcttcttgaaacgccctgcgctagctcgtgtacgacctcttatcagcggcacccttcgcgctccttggaggcgtaagtgccgcacaggaccccgcacccgcgcaagggccgcgatcttttcctaaaactttttgcgaagccatgggatggcagcgattcgaaaaactttgaggaaaagagcgcctcatcatctaggacaggcggtcttcgctttgctcccttgccctgatgcgagaacccgtgcgcctcacgcatcacaaggcgcgtctaaaggggacgcccaagattttaggaggtcgcaaaatgagcaagctaagggacaaggcgatgttggctgcagagcgcttcgtggagcatcgaggctacaacgtcatcggaacgcggtatgagacgaagggcggagacgagatcgacatcgttgccgaggatggggatgcgctggtgttcatcgacgtgaacgcacgccgcgacaccgacaagggctttcccagagagggcatgaccaagagcacacgcgagcgtcgcgaaatggctgccatccagtggttcaagaacgagggcatgagttaccaagaccgccccgtgaggttcgacaacatcgctctattagtgattggtgccgaccgagcgctcatcaagcataccgtgaatgccatgaactatgagcccgctgttcaggtctgccgcaagccagagatcgaggcggaacctgaaatagcctgtgcgaccgcatagcgaccttccggttgcatacggcgcggagcctccctggtgctaacccgggaggcttctctcacattagatttccataagttcacaataacgtgaacttatgttgtataatggaagcgtattacaaatgagcgtgtgtgccgcttccacacatttgccgcatgctcccgagcaaaggattcgcgatgaagacccgactatgcgagggcgccctccctcgtgccggcaccaggctcaagatggcgctatccgccatccgtaacaacctggagcgccttccagatgaaacgcaagggcctgacttgaagattacgtcgccccgccgttgtctgagcgaccgccttccgaaactgcttcaagaacatcgaagaagccaaaagggtgcctcagacgcgtcttgtagcaagtatcccatttcgtaatacgcgccattttggcacgcatccgaaacggaacttggccccggctcattcgtctcgcttcgcggccgaatgcgactcgaagcgatcgccgaggcgacggcagcccaacgccgcatcccgccgaagcggggatgccaggctgggcaagccttgcgggggatgccccgcgcccctgaaagagaccgattcccaaggagttcacccatgaccaagaaaacaaggctcgtgagctgcaggctctcggagagcgactacgccttcctgtgcgagcatgccggcgagctcgaactgtgccaatccgactacctccgataccttatccggatccccgtcgacaacgatgggcttgccgtggaggggaggtgcgtgaccatagacaccctgacgctcggcagaatctacgccgagcttgtgaagtggggccgccactacaaccaggctgtcagggcgatgaacacaatcgccctgaacatgaggcacggcaggcacgaccaaccgttcttcaacgaactcatggaatcagccaactcgaaactggagcagaccgagtccgggagggccggacttttcgacgagctgaagcgccttgagcgctgcactctgatagggagctgagatgccctacctcaagcagattgccgcacacaccaactgccagatgatagagagatacctccagaaggatggtcgtgccctcgcccgcgacttcttcaatctctccatcgacgagagggacgggtatggcgacgaaggaaaggaccagatcgagtgggccgacgagatggatgcgacgcgtcgccttgccggaaacgatgccccattcggaaggctggccgcgcggacatacaagcacttcgttctgtcgccgagcccagaggatgagatcgacctggaatccctccgagggctcacatgcgcatgggcgctcaagcacttcgatggctaccagatcgcgatcgtctatcacgatgacaacgagggacgcatcccccatgcgcacatcgtcgtcaacaatacgaacctcgccactgggcacaggatgcaccacgacgatccgaaggagttcaaccgaagcttgcaggaaatggcaaaggaacgcggtcttctgcatctgtcaaacgaagagaaacacacagagggaatcgcgcgcctggccgagaagggcaagccccgaaaggagaagccgaagaccatgcagcaagtgcacctgggtcgcgccgagaaagagcttgtggattccggcgcttattcctgggtggcggatatccgaaaccgcgtgtcggttgcaaagtcgcttgctagaaacgaaggcgagttcatgaagatactcaaatcgctagaggtgaacgtggccgacaactccgccaaggccaagcgcgacgactgggtgttctcgctcgcagacgagccgacaaagaaggtgacaggcgagcggttgggtctgctttatgcgaaggagacgatccggcgcgacttcaagcgtgcgggctcctaccatccggatgccaaatcgtctaaggagatcttgatgaacgtcaaggacgccatcctcataaacgacatcgcctccttaaacgagctttcgcgggctctgttcgtgtgcgcccgaaacggcgtgtcgtcgatatccgactgcgaccagaggatatcgaggctgaacactatggcggcgaatgcggaaccgaagaaaggcaggtgcctgctcgaatccgcgcgagagctcgaagacgctcggaactacatggcagcaaacaatctgcttcccgagaagagtccggcgaaacagggcatgaaggcaacgaaatccagctcacctcaaaagcaggagaagcgggccattgagcagcgaaggcgcgcgcagcagtcagaacagagccgcgaggagaggtcccgatgaaggtacgcatccgatacgacaacgacaggctcgacatattcgacaccgactccttcacgaagtcggagccattcgacggcgcatgcatgctcaccaacttcgaggtccgcatggacacgctcggcaacaccggcctttggctcatggtccatcgctacgacacaggcgatgcctactcgaaggacgtcgcgagcaccgagacgccggtcgccaggcgaaagcggggctggcgcttcctgctcgccgaggagtcggagctttcctcgatcgagtgcgtgagcattgacggagagcccattctcctgaggatcgccggggagcttgccgacatggtccgcttcgagcagatgtgctcgatatggctagaaggaggctcaggcggctcggtggcgcagcgggtgctcgacctgtacgacgcgctctgcttcgcctatccagacatggccgcagacggcaaagcgatctctcgcatgtgcgggttcagcgccgatgccgtggaagcgctcagaaacatgcttccgcaaccaggggaagaggattggatggaggaatgacatgagatcgatggttcgatgcgccgcaggattcgcgcgctttctggtaaaggcgatgtttagattcatgtaggaggtttcacgatgcagaagttagagttcgcagagaaggtcaagcagcacaaggtcgcactcatcagcacggttgccgcagcaatcgtggtcgcattgctcgtatcacttgcaagctgcagcacgaccgaagacagggggcaaaagggcatcgacacaatgactgccgtcatagaatccgaatccccgaaggaagaagccgaggaccaaggcaacgcagaagaggatgacggggccgtcgaaacgccgtcggaagcttcagccgaagctccagctgaaccggatggtggtgagaaccccgttgctgcccatgcaagcgtgccggatgcgcgggagacgaatagtgagacttcaggcgcagcttccggacaaagtccatccacgccgcagcgaaaatgggttgaaaacacccagaacgtctgggtcgtagaccgtgccgcatggacggagcagaagcccatttacgagaccagggagcgttccatctgcaacgtttgcggagcagacatcacgggcaacacctccgctcacaacaaagcccacatgatggcaggagaaggcagcggataccatagcgatgtccagacggtgcaagttggaacagaggctatcaaccatccggaacagggccactgggagacgaagatcgtcgggggccattgggaatgaccaaaactatctagcttcaggaaaaagtgcaggcgagtagcatctgattatctcaaacgaatagatgctacttgctgggctaacagtattatggcgagcagcattatgtgagagcatacagatttagagctcactagagcaaatctctcctgctgctttctacaggcatcctgttctttatctcagctagcatttcgcgtgttatgaattttttcggaccgatctttagcacaatgcagatcttcaggaattcatcaacccgcatttcgcggcgatggttgaggacataccatagacgcttgcggtcaacgtcaatgcggcgtgcgatttccgcgatacttattcctctgtcaagcctcacctgttcaattgttgacactatcgaatctatgttgctcatacaatgtgcttcattattattattcactcctccctgagataagtcctcatacaaactaagctgaccaactctatttcgggaaggtctaatgcatgtatctagaatccgaacagctccacggttttctccatgccgtcggcaatctttacgccgaacgggcagcgcgtctcgcagtcgtggcaagcaatgcaatctgatgcgtgatgggttagcgcagcgtaatggtccttaacagaagatggcacctcatcctgcatagcagccaagtcatagaacttgtttacggtcgcgatatcgatacccaccacgcacggcgcgcagtggccacaatagatgcagtgcccgaaatatgggtgagtcggcgcattggcgagaatctgctcgaaattcttttcatcggccgtggcggtctcataggccacggcatcatctatctgcgaaagttcgctgtaccccgcaagcacgcttgcaacagccggcctcgtcaggcagtaatggatgcactgaaccggcgtcatggctacgccgaacggcgacttctcggcatcgagcaggcgccctcccgcataaggcttcatgacggtgagcccaacatcgagctcctctgccatgcgatagacctgtgcacgtttaggatcgattccttctgcattcgcctttgcaaagtcgccgaagagcgtgttgatgtcgtcggatgccggcatcatgtcaaaggcggggttgatcgagaacatgatcatctcgacctcgggatgctccagtgcggcaagggcgacgtccgggttatgggtcgagaggcctaggtgctcgatggtgccagccttatgaagttcacgcacataggcaaggtaagggctgtcgtccatgatctcggcgaactcgtcaggcgaatcgacgtagtggatcatgccgagctcgacgtggtcagtctgcagaagatccaggagattctcgaaggcctcctgacactgcgctacatcgcgcgtgcgcacgtactggccgtcttgccaggtggaaccgacatgcccttggattatccacttgtctcgcgttccccggttcgccatggcagcaccgagcttgcgtcgcatctcggggtccgacatccagatgtccatgacgttcatgccggcattttcgcatgtggcaacgaactgctcgacctcagcatcggtgccgtccatccattcggctccgaagccaatctcgcttatttcaagtccggttttcccaagttttctataacgcatggaacaagcctctccttatcaaaaacctctctgtgcaaaacactctctacatctggttttcccagaatgctacggcatcgtttatccagccctcggccttcgtgccggcgcccaatccgaacccgtgggaaaggccttcgtaggcatggaactcggtagggatattcagagccgacaaggaatcgagacggctttgcatgcctttccaattcgcaatgccgtcatttgttcccacgcatacgtaggtcggggcatcgtgaggggagacgggcgaatagcctgtatactgcatgatgatggcagccgcctgatcgatgtcgctcctgcctgtgaaccaagccaggttgtccgcattgcctagtgttgcagccatgcgggccccggccgaacctccccaaagagagtatcggttgaattctattcccagctcgtctgcattatcgtgaagaaacgcgatcgctttggcgagatcagcgtaggggtcgtctggcctatagatcaacgcgaacgcgttatagccgcgcttggatacctcaagcgcctgagggaagctatcgtgcatggcagccacataggagaatccgcctcctgcattcatgatggcggtctcggcgtcctcatctccacgaaagaagaataggcccgtgtcggccttcgaagggtctgcgacgatctcgctttcagaatagatcgggtagaacacctggtggcctgcttgcgcatctgccttcagccggttcaacacctcgacggtcctttcggggtcgaaagccgaataccatacatacacatcactgcccgtcacctgctgcaaggtgagcgattcgtcgacatggcggtcaacgggaaacagaagatgcccgaagccactgaaactttcatctgattcgacttccgcgaccgtggtgtcgagcgtgaagtcacctaggggagcgacccctgtttcatccgagccatattgaacaatggggtctttctttggaatccacaatcggacgaggccgttgtagagatattcgtctgcataggcgtagttgtgcgcgccgccagcacgctcaaggtagtagatattgccctcggcctcgttgtcggcatagcgccatttgccgctatcgtctgcagccatgatgtcgatctgcctcttgaatgcgtcgtgggcgaagtcggcagagcccgatgccgcgaacacgaacaaggcatcccattcgtattgggagtcgtctatcatcgaccgcagataatcaagatcggatgtgagcgacccgcttgctggcatgaagtagcggaaataatcaaggcaatactccaagacatgccatgtggtgaccgagcccatggagaacccggagaacgcacgatggtcccgggacgctttgagtccctctgctgtcgtgtctgccgcgaaggtgctatagcggctctcaacggctgggataaggtcgccgacaagctcatggtggtagttgtccgtgagcttgagggccaggctgtagtcgctgctgtcttctccgctcaggttgttatatgtcgggcataccactatgagcggctggatggccccgtcgttgatggcgttgtcgagcacgttcttgaacccgcttggcgcgccaggtgtcccaagccgcgtggtctcgttcgaccagcccccatgcataaggtagagcacgttgtatagggtctcgttgttgtagcccgggggcagatacacgatggcccgcttatcaagctcggtcttgcggtcctcgtaggtcatcgactcgtatgtcttgtaacgaagctcctcaagcgccccctgcctttcggcaggtgtgaaatattcccttggaatagaaatcagcgaatcagggaaggccagagtttcgtattcgcttgcgctttgagacgctgcggaatcgtatctgctcatgctggattcctcctttccggaagaggtgtcatgcgcttctggattcactgccgcgcagcccgtcatgacaatggcgacgataagtagcatcgccgcacaaagcgagcaaatcgaaaacgaatatgttttgctggggatgcagagtctcgccatcttgctatgccttcgttccgtatctcagccacacagcgccgccatctagcttttcaaccttgcgcagttcgagcggagtcggggcatccttgctgcccatgaggggctcgaaaaccgagacagcgccgtggtcgcttgccgcgacgggcgcgacgaccaagctgagctcgtccatgcagcctgacgcaaggaagctctggtcgaccttgccccctcctgcgaccattgcgcgcttgatgccgaacaaggcggacagctttcgcagggcctctgcgcagtcgacctcctcgcttcccgcgaatacataggagacgcctttcccgcggaggtattcgagatatgcatccgacacctcgtcggtcagcacctcgatcacgtgagccggaggcctgccacctctcgatatggcgcccgacttgtaggcgacggtgcctcgcccgtcgatcgagaccatgtacgtctcctgctcgtggggcgcgacgaagtcgctgcgttcgccgtcggaaggcttagagcccttcgtgtcgtatgcgccgtaggactcgaccatcgtggtcgcgccgtagaccatggcgtcgcactcgaacacgctgcgcaacctcccgtactcattgcgcgcgggcaaggcggcagagtcagacatgaagtccccgctgatcttgccgtccacgctcatgaatatgtggcagacgacatacggtctgccacccgattcggctaccactgcttcttctccttggtgacgtcttgggacgcgcgcctctgctcgatgaggttcacgaacatctgcaccgtggccgggtcgcggtggtcgaagaaggcgctcttctcagtgtcgagctcctcgatcttcagcatctcgtcggttgagagcgagaagtcgaacacgtcgagattctcgcgcatgcgctctatgtgcgtggacttggggatgacgatcacgccgcgctcgatatgccaacgaaggatgacctgtgccacactcttgccgtgcgccttggcaatctctgtgagaacgggattctcaagcaggttgccgcgaccctctccaagaggcgcccaagcctccatatgcacgccaaacttgtcgaaccacttgcgagaagttatctgctggtcgagaggatggcactctacctggttcaccatgggcgatatgcggttgaatgcggcgaggtctgccatcaggtctgccgagaagttcgagatgccgattacgcgcactttgccctcatcgtaaagcttttcgaggtcgcgccaggctccgtagtgatctccgaagggctggtgcagaagcaccatgtcgatatagtcggtcttaagctttttcatcgactcttcaactgacgcataggttttaccatcaccgtagttgtcgatccataccttggtggtaaggaagagctcgtttctcggtacgccgcacttggcgactgcctcgccaacctctgcctcgttgaagtagctctgtgccgtgtcgattgagcggtatccgaccgatatcgcgtccgccacgcatcgttccgtgtcgttagcaggtatttggtagacgccgtatccgagctgcggcatcttaacgccatttgagaattcgatgtattccatggtcagtcctctcagattgtttccagtattagtattcgagagtgttcagccactcgtcgacttccgctttggtaacggaggacgcgaagcgcataccctcctgccactcgcccgtgcctgcagcctcagccaaaaggcttgcgctgtcgccaagcccggacgaagaagatgtgcagaacggaatgaccgtcttgcctgcgaaatcgttgccagtgacgaatccgtcaacgggccatgctgcgatgccccaccagattgggtagccgatgaaaatcgtgtcgtatgaatcccagttatctggcgtcacctgggcaagctccaccgtgcgaagcgaggggtcgtcgtgctcgcgcgtcacgcggctgtcgttgttcctccagttgaggtcgtcttcggtgtagggagtgacgggctcgattgcgaacacctctgccactgtggcctcgactatgtcgtttgcgacgtcttcggtgtttccggtggcggaatagtatgcaaccaaaatggatgaccccgatgccacaggctcaggagtttttgtagtggcttccacttgctgagatgcgctcgatgatgccgatgagcttgaagcgctcgatgcattctgagttcccgcgcagccaacgagtgcgaagagcattgcgcatgccgtaagcgccattacccttaaaatcgtcttcttcattagacactccttaaatttgaggcttgaacaaactatttgcttatgaccttcgagcccccgaacacctctgacatcggcatagcatcgagcgctgcgttgatgtcggcgatctcgcttgcgctcaagtgcacgtctgccgccttagcgttctctgcaacgcgctttgggttgcggctccctggaattgggatgatgtatggcttctccgacagcatccatgcgagggccacctgcgatggcgtggcatcatgccttgcagccgcctcggcaatcagctgcagaagcttctggttttcgtccatggcttcgtctgtgaactgaggcatgttagctcggtaatcgtacttcgcgtcgtagcttccgcccttgccgtaggctccagaaagcagcccgttcgcaagcggagagaacgcgacgaatgcgacgttcaattcctcgagcaccgggaagagcgactcgtgccagcgcgccatcatcgagtagcgattctgcacggcagacacgggacacacggcattcgctcggcgcaggtagtcctcgtttgtctccgatatcccccaggcacgaatcttgccttcggcgatgagctcgcccatggtcccagccaccacctctgcaggcgtgttcggatcgatgcggtgctggtaataaagatcgatgtagtcggtcccgaggcgccggagcgacccttcgagcgactcgcgtatgcgctcggggctcgagtcgacaatcagtggataaggtgcaacctcgacgcttcggtcgaagcgtaagccgaactttgtcgctatcaccacgtcgtcgcgcacatcggcaagcgcacgccccacgatgcgctcgtttgcgaacgggtcttcggtcgtgccgtagatctcggcggtgtcgaagaacgtgtagccgtcgtcaagcgcagagtgtatgacctttacggcttcaccttcagaaagcggttcgccatatgcgtgggttagccccatgcatccgtatccgattgctgaaacctcgattccgctgtttccaagaatccttttatccatatcaaccttccctctagtcaagcgcaaagcgctgcgtaagccactgcgccagctccttccacagaaaccccggaacatccagccaggcgagatggaacgtcactttcgcgtcctcatcgtcaataggaaccgcagcccttgatccgagcatcgcgtccaggtcctcctttgagacatcggtcacgaagccagccttctttgaggtctgcgccacctggcgaaacatcaggtagtcgtcatacgtctcgtagcgtgagcttggcatgtgttgctccaatacctcacgccagaacccgacgcccgagtacatgacgaaagactcgccatcgagctcagaaaacctgatcgccttcctcttggccaaggcatggccttcaggtaatgcgactgaaagcgactcgtgcatgatgggcgcgccttcagcgtttggcaggtcgagcggcgcgggcaatatcgcgaagtctatttcgccggatagcaggctggcacggacatctttgacggagcggacctcgggtatggcggtcagcttcaggtcatactgcggtatcgccggaaccactcgccaaagaggggcgggtgcgcacgagccgatccgcaccgtgctcgtccgctcgcgccagtctcgcatcgcagcctccaatcgcgccacgtcatcgcatacgagctcggcgtagcgaagagcgagccttccggcgtcgttgagagcaatcgagtttcccgtgcggtcgaagagcctgacccccatctcgccctctagcttctgcaaggagcgcgaaagcgcagactgcgagatgtggccgtcctttgcgacctcggataacgattcgctacgcgcaatctggatgaggttttctaattgctgtaattccatgtaggctccttggattcgaattttactgccgtttttaacttattcagtttgcgttctatgcatactagtttgcacaaatggcattgtacttatgagtgtcgtgcgcgcaaaatgtaagcatcgaatctaaaagggcgagaaaggatatcgcatggaatacgtagaattgaacaatggagttaagatgccgatggagggcttcggggtcttccaggttccggatgcggcaatttgcgagaaggccgtaagcgatgctctttcggtaggctaccgctcaatcgacacggcggcggcatacatgaacgaacctgccgtgggtgctgcaatctcaaagagcggcatcgcccgcgacgagctcttcgtcaccacgaagctctgggtgcaggatgcgagctacgagggcgccaaggtggcactggccacgagtcttgagaacttagggctcgactacctcgacctctacctgatacatcagcccatgggcgactacattggggcgtaccgatacatggaagaggcgctcgatgcagggctcgtgcgcgcgatcggcgtgtgcaactgctatccggcagtgcttcaggacatatgctgcaccgtcgacgtgacgcccgccgtgaaccaggtcgagcttcatccgttcttccagcagcctgccgccatagagctcatgaaggagctgggagtcactcctgaggcgtggggacctttcgccgagggcaagttcggcatcttcaccgacggcgtgctttcctcaatcggtgagaagtacggaaagtccgcagcccaggtggcgcttcgctggaacgtgcagcgcggggtagtcgtcatccccaaatccacgcacatcgagcgcatggagcagaacttcgacatctgggatttcgagttggatgcagccgacatggcagccatcgccgagctgaaccgcccgaatagcgagatcgtcgaccactcagaccccgccttcgtgaagatgatccacggcctgaacatccactagagaaggcaaactgatggtagcaggttcaaagcactcgctctctccgggaacacttccaagtgttcccgagcccataccgggcagctacttcgctccggcgaagcgccagggcagtctcgtcgaggtcttctacgagacttacgactcattgagctacgataagaaatcaattcggttgacgaagcgcgttatcgtgtacctgccctatgaatacgatgagggcaagcgctacgacatcgtctatctgcagcacggcggatggagcgacgagacgaagtatctgggctcgcccaggcgccccaccgccttcaagaacgtggtggaccatgccatagaggacggcaaaatggtgccgatgatcctggcatgccccacctacaacaacctgagcaaaaacgatagcggggactacggcctggcgcttcgcctcacatcaagttttccccgcgagctagcaaacgacatcattcccgccgtcgaggacaagttctcgacgtacgcaaaggacacttcggcagcagggctcatagcctcgcgcgaccatcgtgcttactgtgggttctcgatgggatcagtcaccacctggcatgtcttcgagcagtgccttgattatttccgatacttcatgccatcaagcgggagtttcacgacagacgggcgctacatggctcacattgtgaggaaatcgggatatgcgtgggacgactttttcattcttggcgcatctggcagcgccgactacggacaaagcgggtttaagcgccagatcaactccatggctcgtgttcaaacgggagagttccgtctggccgacaatgagcagaacggtaatatatggtatatggaggagccgggtggcatgcatgacctagaccatgcatggctttattgctacaacggcctctgctggctttggaacacgtcctcctcttatctctaggctactgattctgcccaggcagcaatctcttcttcgctcttggccgccttgtttccagtgatggaaagtcccttcacaacctttgctccaggacatgcctcctctatgaaacgcaccgagccaccaaggcctgagccctcgttggtgcagaagggagcgacggtcttccctgtccagtcgtagtgatggaggaacgtgtcgaccaccatggggatggtgccccaccagttggggtatcccagaaagacggtgtcgaagtcttcaaggttttccatgtatttgaccggctcaatcctcgctcgctcctgaagctctgcctttgcctcatatcgaggagttctctgtgatattgaaggaactgttctaatgccggtcttaattatgtgagcgctgcaaaccaacccgaacaagatcactaggtgacgaagcaaacactacagtacgtgagttaggtgtttgatagctgcaggtcgcaaagccccagactgactggttgctaaaatctgaatcgagaacgagatccgacttatcgattgattccttcaagtaggattttcgatcatcgtcatcattaaaagtcgtacggataagctctcggtttgcattgacaacatccacggcgttgatttccaattcgatacgttcgttgtcgtgacgtgtgtagatataaattgccttgtgcgattcggcatagtcgcggtctatgaagtccgcgaaatccgcgaacacgcttccgtctgacatgtgatgcccgtagacgaccacgaaaggcgactccggcgtgcagtcgcagtcgatgtatggcgtgccgtaggctccttgaccaaaagcgtcatggtgcaggtagtaatcagggttttctggagaagcttgagcgatcggctcgtcgatgctcgttccgggaacttcgacccaagcgacgatggactccggaagcgagtcccagtcgatctggcggacgtcctctgccgccttctctgtcccgttatgcagttccggtgcaagctcctccggaagcgtttctctcaaggcgaacgccagaagcgctagaacggacattgcgacaagagcgcgcccggccatcgaaagagggcggacattgcgtccgccctccgtttgggcgcctggttcgcgcctactcttcatcgaggatttcctcctcgtcatgcttgcggcgcttgagaagcgcgcttccgccacccgccagcccataggcgagaagagccagagagccggcaccggtagctaccgcagtggcaatagcgccggtcttcggataccccttgccggtcgcctcgtctacgatgctcacggtctgcgccgcgtcttcgatgtcggcgtgagtcgcgacctcgatgccgtccttcacgagcgactcgaacacgaccgcgctcttgccctcaaggcccgtggcgtcgaactcgaaggtcacttcggcctctcctgcaggctcatccggcacgaacgtcgtgcttgccaccacctcaacaccggatgcgtctttcagaggctcgcctgtggccttgtccatgaggatgcccgagacgacgtaggtcttgccggggatgaggttctcataggtcacggtgtcgaccacgaccgccttctccttggcgatcacgttcttgtccccgtcgtatccgtcaacggcactggtgcagatggacgggaagaagatggactgtccctcgtcctccacatcctcgtgcacggctatgacgttgctatcgacatcgaccagctgctcgaagaagacagtcgtcttgcctgagagctcggttgcatcgatctcgaactcgagcgtgacgcttccatgctcctcctcgggcgtgaactcgaggatggtgacgtaggcgtcgccatcggggtcttcgaggaagtcgcccgtctccttgtcgacgatatgcccgcacatcgtataggtgttgcctggtgtgagcccctcgtattcgaccgtgtcggtgagcacgagcttgtcgcccgctatgcctgtctggtccccaatttcggggttctgcgcctgggtcgcgatgtcgacgacgttcaccgcctggtcaacatcgtcgatgtcggcgtgcaccatgtactccgcatcctcgaatgtcatctcctcgaacgcgacgagacgggtgttcgccatgctcgctccgttgaagatgaaggtcacctcgacggttccctcgaagccctctgccgtgaaggtggtctcggccgtgatctggtttccgtcgccatcgagcgcaggctcgcccgtggccttgtccatgagcgtgcccttgaccgtgtactcacatccggggatgacccccgtgtactcgatcacgtcgatgatggtgagctcgccgcgtgcctggccctcgtgtgcgcctgatgcggcgtctgttgccgtcgtgtgcatggtcttgggcatgttctcgatctcaagctcgtacacggccttcatggatccgtccttagactcgaacattccctggtcgttcaccttgaggtcgtacaccttcgcgttgccctcgtcgtcaacgtcgcatatgacatatccctcaggggcctcgatctcctgcaggtggtagcttccgtgcttcaggtaggagacgtcgagcgcgccttcggagtcggtgacgacctcctcgtcgaaggacccgtcttcgctccagaggcggaacttggcgccctcgaccttcttctcggggtcgagcgcgtccaccttcaagaccttgagctcggtagggacgtcaactacttcctcatccacattgaagacggagacgtcctgcccctggtattcgagcgtgacggtcttctcggcgacgtcgagggcgtagccgtccttcgccttggcctcgtagatcgtgtaggtgccgagatatagctcgctcgtgcttgcgcgtccagcctcatctgtcacgagcgttgccacgatgtccccggccttggcacggaccgtgccctcgggagtgacgatgtcggcggccgccttcacgatgtaggtggagccgtccaccgcctcatcggtcacagcgtcgtgcttcacgaccgtgatggtgcccttctggggcatgtcctcgaacgtcacctcgatagggctcgtccagtcgttgtagacagggcctacttccactggcatgccttcgagcgccttcacgtagccgtacggcgcctgcacctcggtcaaggtgtaggttccctcttcaagcagcatgggaagcgtcatctcgccgcgctcgttggtggtccaggtgtcctcgaccacggtgtccgggtagtggaactcgtatgtgacggggttgcccgatgcgtccaggagcttgaaggagcattggagcgggatctggcgccccgtctccgcgtccaccttgtggatcttgaggggcgtctgcgggatgtggttgttcacgagcacgggctcctcgtactggccctcggaggatatcgtcatcttccagtccggaaccgcgatgatgtcatgcccgtactcggccttgaacttggccgcgaccgatgcgggcacaacctcgtgcacggtgtacgtgccgtacgcgagagcgcccgtccaatctgccggtatcgaccagccgttcacggccgcgccgctcttcgtggatgcgagtccgttcacgtcggtcgtgatcgtgcagacgacgcctcccggcttcacctcggacttcgtctggggagagacgacggcgtgctcggaggcgttgatgagctggaactggatgccgggaaggagcacgcgcttggactcctggactatccccgagtcggcctcgacctccacggggatctccttcacgagacggtagtcgccgcgcttcacggtgtctgcggacttgggcgtgttgtaggtgtagaccgcctcgccctgcgccccgtcgtccgtgatctggatgcagaacttcttcggcgcattgccgtgcccgtcatcgaggttgtagccgatgggagccttggtctcttggacgactatcgtgccgagcgggatggtggggtccccgttgctcatgcgatagagggcggggcctgccaccttgtacgcgtcggcgtagtcggcgaagccgtcggagtccgtcttgaagacccacgtcctcgcaggcgcacccgagccctctgctgcagacgcgctttggtattgccccttgtagtagctcacggtgaactcggcgccggcgagcgtgccggagccctgaggcgagccctttccggtcatcgcgtcgatcttcatgacgagcatgccgacggggtctgatttcgggatctcctttacgcctgcggcccctccgacgggggtggtggtatccggatagacctcggcctgatacgttgtcgggtcgagcgcgtatccgggagacgccttcgactccttcacgtagtaggtgcccggcatgagctcgccgagctccccttggccgttctcgtctgtagtaatggatccgaccttgctcgcaaggctcgcatcctcgaagacgtcgtatacggcgcccttcaggctgtaacacgggttgtcatcgctcagctccttgagcgcggatgtcttggcgaggccgagcttgccatagggcacgtaggtgaacgagaggatgagctggtttccggaaccggtgtagagctggtatgcgtagaagttcttcggcacctcgccctggcgcgcgcacatctgccgtccggtcgcgttcgggttgatctcggagccgtcgttcccgaagccgatgatgttctgctggcaccacctcttgaagtcggcgctgcagccgtacatggcatagttgccgttcgacgagtaggtgtctgagaggaggatgtgcgtgagggctgcgtagttggcctccgtcatcgggcttccgtcataccaggccgttggccacatggacgcgtcgaatcccggggagccgtagccgaaccagaggtcggcgatggtctccgtcgtgcgtccgctcatggcggacaccgacgatttggagtaggttcccgcaggaggggtcgcggcggaagggttcgcgcaataggcgacctcgccgtcggcgtacatccatgtcgtgtagtaaccgccgtatgagttcttgccgcctaccgtgaggttcgccgtctccgctgcgtatgcctcttgcggcagtgcctggaatagcgttgcaaaagcgcccgagagcgcgagcagcgctgcgagcagggtgcgcagggccatctgagcggcgcgccctttcgcggtcgttgtcgtttcattcattgggcaccgccttagcgagacttctcgtcaaaagggacgtcgtggtcggccatggcggcagacccctccttcgccgctgccgcacgctcggagagggactgctcgtctcgcgatgtcttggctttggacttggacttagccttggtcttcgcctcctccttctcctcctcattccccttctcgggctcctccttcgaggccttgtagcgctcatatgcctcggagagcgccgtcttgatctgcgcgggcatcaccttcacggtgtccttgacgggacggccgtcgtctcctgccatgggctggccctcgttgtccatcactgacttctgaagccagacctcgcggccggtgagaagcgggatgtcgcggtagttctcgccgcggtacttggagacgttcacgtagagagggctgaactggtacccggatacgtccttgtccccgatgatggtatcccccggcaaggtgacggagttgaacgtcttctgctctccggtcttcttgtcggtgtactcgatgccctcgcgcacgaagttcttgtgcagggtgatgtaggtgttcttcttttccttggtctcaggcatatcaatgctcctttgcttgggtttttgcgggtaggcgtggaagccccgcattggtttgcatgcttatgaggtcccgggcgcatcgtgtgcgccctaggctctcatccccgtcgatcccgtgtgcatcctcatatccatgggccctagaacccgctcacgatgtcgcgcgcccaggccccgctcttcacgagcgagaggatgagcaggatgcacatggcgaggtactggagcgcgtaggtgagccctcccacgatgccgtcgatgggcgtgccggtggcggggttggccgccacgaggccgcccaagatgagcgggaaggatacgagcagcaccaggatgatgaggcccgcgaggcacaccgccgtgaagttcttcaggtacccgatgccgatctggcgcgtgtcgtcgagcgccatgagcgagagcggtatcggggcgaaggccgccatgatgtagagctggagcgcccgcgcccagcagaccacgagcgccacgatgtatgcgatgagcaccacgagccagcttatgagcgagaccacgagcatggcgacgagcgccgggatgtcgtcgtcctgcgtgacgatggatgcgcccgcgaggtctatcgcgccgcccgttccgaacacacccacaacccggtcgatcgcgagccccacgacggcgtatatcgccttcatgagctcgaagctgttctggatgaggaagaggaatacggcgaagaagacgaggaggaaaacgacctccttcacgcccggaaggctctggtttccgtccatcctctgtgatatctggatgagcttgatggtgaacacgagcgagagcacgccgcacccgatgggcagcaccgccacctgccagaccgagtgcgcgatgtcgttcatggacaccgtgcccgaggtcccgagcatgtgctcgaagtcggcaccgaggatccccgagtacccgatggacttgagcacgtcgacctgcgctgagaacacccagttgcacacgccgcgcaggatcccgcagagccatgcgttgatgtcgtctgcgatggatgcgtatgcgctctggcagggcacgagcgtgagagcgagcagggcaaccgtgccgaggaacgcgacggcgaaccgcctgtcgcgcatgaccgagcgcagtgcggctacaaccccgctcatagcgtcgccagcttcccggaaccgtccatctggacggtcacgatcgtcgatgccgcgtcgtcgagcgtgaagttcgtgaggtagcttcccgcattgaagtctatccagacctcgcccgaccatgcggccttcttggcatggggagacctctctttcgcgtagtccccgatcacctgcttgaagtctccctcgctctttccgaagaggtcgtagagctcatccgtcgcgcttgccactgccatgtccgcatcgaccggcgcgctcaaggtgtatttgcatgcgagcttgtcgcatacgatctcgcgctctcctccgacgtcgcgcacgaccgccaccgtctgctcctcgtcacccgtcatggaggtcgacaccgagagcgtgaccgtcatctccttgtccgacacgtcctcggagtccacggtgtagtagaggatcgtcgatcccgcttcgcccttctcgacgaaggcgccctcgatgatgctcagggtggatttgccatcctccgattcccagttagtgtttttgaggtccgcaaatccaccttgggcaagagcttccgcgccttcgcctccctcccggtcctcgatggcttcctgctggaccgcctgctcctctggaactggcgtctcttccggtgcgagcgagcagcgcgcggctcccgctcctatcgttatcgcgatggcgcctatcgcgagcgccgccatcaccttgctcttcttctgcattttcttgcttcctttctgtcagaccctgtatgtgagggcgtaggagaagtagttgattccgctggagcgcttgcacacgtcccccgagtgcggctcgtgtatgtactggtcgccgccgacgtatatgccgacgtggcccgtcttgtagaggatgtctcccggcttggcctcggagatggggacgtgcctaagctggcctgcctgcacctcggtgttgtggcctatcgcgattcctgcctgcgcgtagcagtactgggtgagacccgagcagtcgagcgcgacgcctggcgtggatcctccccagacgtaaggcacgccgagctggctctcagccgcagcaacgatcttttgcgcctttgcgtccatgtccttccagtcggacacgctcatcgaatcgaagcggcgaagcccgtaggtgtccatgatcgacttcaaggtctcgacgtagcttgagctcgtggcccatcctccggctttgagcccctctgccatcttgtccgagtcgtggctggcgattgcctccgcgatgtacggctggttcttgaagtgcggctgctggaggaacacgcggctccggaacttgatgcagtccacgtcggacttgaataccgtgaaatacgcggtgatggtgacgtgctggcctccatactcctcgccggtctgccaggcggacttgcccgcgacctcggggcatgcggcaaagctcgacgcccacttgatgccgaagaggttgtggtctcgggtggcgagctggctcatgtggtcgccctggcccgactcgcagatgatctgcgcgatggtgcatcctgcgggatggccgtagtcctcttggcactgaagcgccgcctccacgatctcgtaggtgatatagggcggcagtccctccatcatctgcttgttggcctcgttctcccagaagccgaaaagggcgcttatcagctgcgctatgagcagcacggccccgatgaaggcgaggatgcccgcgatgatgcccgccacgggggccgctgcgccagacactgcggcggctacggttttcgcggctccggccttcgttgcgcttgcggccttacctgcagctatcgcctccttgggggctgccgcactcgacgcggctcccttggcgcccgtcttcgatgttgcttgcgcgcccttggccttggatgtgtccttcgcagcgttcgccgacttgcctttcgctgcttttcccgatgccggcttgcgcgcatccttcaccttcttgtaggcacggcgagcgatgagcgccttgtcgtatgcgccgcgcgcgccctcgaactcgggggtgtcgtcgagctcgtctgcgaccttcgatcccgcaaggacgccgagggacttcctcttttcctcggccgtttcggcctgcttctctgtcttcggttcgttttgcgcattcgcctcggcgattttgacacctggctttcgacccgtaagcgctcctttgggtcgggacttccagcccttggcgccgtcgctggaacgattcgtcccagcggatatcccgtgagcagatgcgcctttgccctttgccttggaaggtgtcgtcgcgactgcgctcttgcgctcgccggctgcgcttgcagcctcggcaagggtggagagcgactgcgtgcgctggtccttgacagcgcccgagttgagcgccgtcgccttttcctctgagacgaggtctcgcatgcccgcgccttcgcttgccttgtgtgcggaagcgctcacttgcgcctcctgcggcgggtgcgtcctccgttgttgtgcggacggctctcatcgccctgattcgactcggcgttgcgcttgaactcctccttgcgtttgagctcggcgatctcggctgctttggtgttcaggatgtcgtagatgatccccttcgggaagtcgtcgcggatggggacgcgcacgccgcccgcgacgagcatgccctctccggctttgatggagtcatcgatgaagccctcttcggtgtccgagagcgcgagtagctccgaccagctcttgcggtcgagcgccgactgcttgtggaggaggcagaagtcggagttcaagaccatgttgcgcgccgactcgtgggcgagcatgtaggtcgagttctgagtgatgcccgtggcgatgaggttgaacttgcgcccctccgcccagaacttggcgaagtagtcgatgatggcgggatgcccgaacagcgactgcacctcgtcgatgtagagccaggtggttacccctcgctcgaagtttgcgtacatccggttgcgcacggcctcaagtgcggtcagcatgccgaacactcgcatgttctgagagaggtcgtggaggtcgatgttggtgatgcggttctcgaaggtgacgttcgagggcctgttgaagaaggagagcgccccttttacgaaccgctcgtagcgaagcgcgatgtcgcgcgcctcgcgctccggctgctcggtcagcttctcgtagaagtcggagagcgtcggaatgcgctcacccgtggcggcataggccccctccacgcagcgcgtgatgatggacttgtccgcctcgggcaacccctcctgcccctctgccatcatggccgatgagagcgcgaggaacgcatctatcttgaatgccatctgggaggcggaggccatgccctcaacgtctgataggtcgaacgggttcatatgggtgtcggagtcgggcgcgaagcggatgttcacgccgtcggtggagtcgatgacgtttccgtactcgccagcgggatcgaatatgatcacctcgtcgtcaggatgtgcgaggatcgtgttcagtatctcgcgcttcaccgagaacgatttgccggatcccggcttcccgcatacgaagcccatgggggaagccaggagctttcggttgcacatgacgaggttcccggactgcttcgactgcccgtagtatccgccgcccttctggttgagctcctgggatgcgaatggcatctgcatggcgatctggcccgtggtcaggtgccttgagacgttcacatggttgcgtgccagcgggagcatcgagttcagcgcctccttctggcggtagtcgagcgtgacgaccccgagggagtttccctgggcgatggatgtcacctgctcgacctgccggtcgagctcgtcgaaggtgtccgcataggtgtagacgagccccgtgtagacgaagaggcgctcgttcttgttgcgcaggaagtctaagagctcctccgcctcctccttggagtaccggagctcgggagggagtatcgagtagtcgtatcccttcttcacggccgccatctgctcgtcgatgatctccttgtccatccagtcgagctggcgcttcaccatggcgagcgcgtcggactgcgcgatgggctggatgtgcagcgtcaccgcgagcgggatggggaggtcgatgatcgatgcgaggtaggagtcctcaagcatcgagccgaagtcgcggatggcgagcaccgagccatacacaccgtcagagcagaacgcgtctgcgcgcccttccggcgcgaagtcgagctgcatgggggctatgaggtccttggtgcgcagccctcggtgctggatcaatttgtcccagtcgaactcgaagcgcttgttcgggcgcacgatggcgtcgatcgcacgcaggcgctctgcgccgtcaagcgcagccgcgtcgcatcgtatgcgagcgagcgtcgtcgccacgtctgcgcggatgcgcatgagcttgggcacggcagaatcgacatcgtctgcacccaccatgtaggtgaggtatcggtggcgctcaaggttcgatacgccctcgcgcatcttgtcgttcaggatgcggttgtactcgtccactatcgggcgcgtcttctccgtcgagtgctcaaagaagcgcttgttgccgatctcgtgcgcgggtatgggggtgttcgcgacggtgagctgcacggaggtgtcggcgttgaaatagttgtagaggcccgagagcacggtgaagatgttctcctgggtctccttgcgcgccgactggtagctcacgtccgagagctccatcgtctggctgaagaggccctcttccacctggcagatgccgtctttgtacatggcgtcgtatccgatgtaggatgagacctccttggcgctccttcgttccttggttttggacttccttttctcctcacgggcctttgcttcgccgttccccttcttggccccgcctaaaacaagcgacatgagcgtgctcttcttggcgggcgccttctgcttgctattagtcttctttggttggctcatggcactccgcccccttcctcttaagcgcacgttttgacttgcgtgacggcttgcctgaaacgggccccgttgcctcgaaatggctcgttgggatgggggactcgtagagaagccgctggcacctaaagtgctggtcgaggaagagcggggcgaactcctccagcttcatgccgaagggccgccagaagcccgcgagccagaacggcagcgcagccgccatgacgggaagggtcgcgtttccgacctcgatgtggaaggcgaagtagaggatcgcggcgacggctatggcacatgcgaagccccctgcgacgcacacgagcgtgcgcaggctcatcttgccgacgatcttctcctggtactcgcctatgtccttctgtattggtatctgcaacgacatgcgcatcgcctacttggggagccaggacgtgtcgagcatcccgaaatagaccgaggcggcgatgatgatcgcgccgcccgcgatggtggatatcgcgcttgcgatttgcgagccgccttgctgctcgcggatggccaggccgagcgagaccgcgccccagacgacgaggaagccgccgaggaaggtcacgcagcccgagaccagcgtgatgatctggctgagcatttttgtatgtcctttgcttgtcatcggcaaccgtcctcatgaggtgtggaagcgaggccggttgcgctcggatggtagaatttcaacagggcattcatgccctttgcttggggcggcggcacgggccccggaaggtggaagctccgacgcccgcctggcgatcgatcgcggccgccgcctgcatcatcttctaggtctcatctgccacctcctgtatcgcgcgtccttccatgtattccgagaagtcgaagggacgggcgtgcctcgcgcccttgtgcccgggatcgacctccgggtaccgcggatgctcctctaacgcgtacttcttgtcctttacgggataggttcccgagatgagcagtatcgcctcgtcgcgagggagccgtccgacctcggacgcctgcatgaggtcgcgctcgccctttgcgtagttcttggtcgtggaccagctcgcgccccgcgagtcgttcaccgacagcgtgtccagcgtctgcttgccgatggactccgatatctcgcgattggtctcggacgactttccgccgaggaacagcagcgtgtcgcagcagtccgtgatggtcgcggcatcgtcgtcgtatgcgcttttgagctgcgagagcgactgcaggattatcgagcaggagatgttgcgggaccgcacgacggcgatcgtccgctcgaagtcgggcaccgtgccgatgttggcgaactcgtctaagatgaagtgcacgggcgtggggaggcttccgccgtagcgcttgagcgccgtgttgcagagcacgtccatcgcctgccacatgagcatggcgaagaggaagtcgaaggtggagttggtgtccgacatgctcgcgaagaccaccgtgcgcctgtccgcatctcccaggcggtcgagctccatctcgtcgaaggacaaaagctctttcacctcgttgatggagaggggcttcaagcgcacgttgcagctgatgatgatcgacttcaaggtcttgccggcggcggtcttgaacgccttgtagttggagagcgcgaagtcctcatccggggtggttggctctccgatgtcgacccagtcgaagctgcccgcaccgttgtcgaaggcccggctctcgtcgtcgaacgcgctgccggcagcgcccgtctgcaggaatcgcttgccggtctcaagctcgtcgaagagcacgtcgagcggacttttgtagcgctcgtcgtcctcgtgggcctccgcaaggccgagcagcatcagaagccccgggatgttgcgctcatcctcggggcagtggtagatgagataggccacgagcgacgtgtagaggaggcgctcggcgttctcccagaacgggtcctgggccgagtttccctctccgttggtgttcttgatgaggcactccacgaaggtgagtatgtccgcctcgctctttatgtaggcaatggggttgtagtggttggagcgcgcgaagtcgatggtgtcgaatgtgcggatggcgtatcccgaccccgcgaagaggtgccccatgtcggagatgagcgtgcccttcgggtccgtcacgaagtagctggcgttgagctgcatgaggttcggcttgacgaagtagcgcgtcttgccggaacccgagcctcccaccacgagtacgttcttgtttcggtcggtcttgaggtcgaaggacctgcggctcatcgcgagcgcgtagtcgcgcgtgaggatgatgttgttgtcggcgttcttcgtgtccttgaaggcgagggcctcgcgtcgcgtcgcccagcgcgagctcccgtgctcttcccctgcgcgcctctcacctgaatgcatgaggcagtaggagtaggcgatccacaccgcgcagacgagcacgaacccgatgcagagcgccatgggctcatcagttagcccatggccggacatgagatattggggaagggtgaggaccgcgcccgtgaggttcccgagcgcgtttccctcaagagaaagaaggtttgagacgtaggcgtctccgagaatgaaagctatcggcgttgcgacagctgcggcgatcagcggccctttcacttcgagcgcacttccgcaagctcgatgtcgcgctcgggcgcgcgtgcctcgtcaagcgccttggaggactttcgcgcggaggcggcgcgctcctctaaaggctcggagtcgcgcacctgctcgcgggtcttgccgcgtgcctcaagcgccttgtcgagcgctcggtcggtctgcttctcgaggtcctcgaatgcacgagaaacatcgggtgcatcctccacgcggaagagaaggaagtcatggccctcaccgtcggtgaagaagtcatgctcgatcttctgtccatggagcctctgatctattgcctccttgatggtctcgtattcgggcaatgcctcgaactcggcgagcttgagcttggcccattcggtcaccttgtccgcagatccgacctcgccggcatcggcgatctctccgcgcgcgttcttgaacgcggacttcaacctctcggcacttgcgagaagcgcggcctcgctcgcatcctgcccgaccttcatcatccaatcgagcagcttctcgcccgactcgtcaccgaaatccccagccatagggcacatctcctttcctgcaggcgctagagcgcccaaaagcgacaaagacagataagggttctcccagcagggcttgcctgctaggagttctctctgatctgtctctgtctggaaggagagccgagaagcacggctgtgtcgtatgggtctcgatcgtgaagcgcctggatcgcgcactcgaatctggcacggctatgcaaaaggccgccgaacgaatagctctcgaacggaagccaactgcattctcctgtgccatcgtcgaactggcgcatgagcaccagccattcatcgcccatgtcgacttgctgcacgaaggcgagatcgcgaaagaccacgccctcgcgtattcggtgagatccggagcggaaatactcatgaaggctcacaaggctttccgagttgaagagttcaaagcgatgtgtttcggggatgttcgaggaaggatctgtgccatacgagagccaacgactctttaggcatgctagcacgatcgagtcgtgctcttcgctgcctagagcagttagccctcgtatgttcttagcttcgatcacttttcttggatgccctctggtttcgttggtgtcaattaggtttgcatttccgctcaacttggatcctggtgcctgctttaagggcctttctccgatagcccgaagcaataacgggtatcgacagcgtatggcttgccggttataagcaggtaccgcttcaagctaacatttgctctgatggctattggggttttgttcccgattcaatgaccgttgttcttgattacacaacaaaaattttgaatagctcaaatgaaagcgcgctcgctctgacttgaagagacgcgtctaatcagaacgctaaattccaatgaatttgatctctagggaacaccaagttatatattccagacataagaagccagaagaatgttttctcgcttatctaaagctagtcactttgttagatgctatgccaggcgtcgtcaaggtcggcggcgcaggtttccacgacagtgcgcacagcggcaagctcccccggcgtgatccggtcattgtcggctttgtcctcaagcatggcgatgagtctcgccgcgccctccagcttctcggatgactgaaccacaacgttgaccatttccttggtaggggcgtaatctgcgttcgctgccattggggacatcctttcaggcaaagtgttcgagaaggatgatggtaagccccttgtcgtaaaagatgagaggcatccacctcagttgtcaccctgttgggaaatgtacgtcaattacccaaaacggcagatgcccctctgtccggcaattgacgtacatattcgatttgggtgacctatccattataacgcccgcactcgtgcctcaaacgcttctgcatgcctttcgcagaggacttcgccgcagaagtcgagaaactcacatgaagcgaaatgccgagcataagaccatttcatgaaacgccataaggtccgcatcacactcactcccttccgacctgcatgaacgcggggcgggatgcttcctcgcggacctgcgagagttcctcggagttggcggcgaagacttcgagcgtcttcacgtagcgcccgtaccgctcctcgcaggcggcaaggtatcgctggtaggcgccgtcctcctcgcatttcgccaggacctcggactcgggcgggcggtcgccgtagctgtagagcagcgagcgtatgacgtcgcgcctcgtctgcaccttgcgccagagcttcgcgaatccgggatcggccttggcgagctcctccatgctcagcggctcgccgtcggttcccatgatgtcgggcgctatgggctcgtccgcccaggcggcgagcccatcgtcgcattcgagccagcgcggcaggttcttggcgaggcgattgtcgtcgccgttcctgatccagtagtccttggcgtatgcggtgtaggcgtcgatgatctgctccggctcgaagcccgacgccaccctggccttccatgccttcaggcagtcgcgcttgaacttgagcgaggtgagcggcttgagggatatggcgcacagtcgctcgaaggcctccgggaactcgcccttccgaaactcctcgaatccaccttcgcccctctcctccgacctgtcagccggctccgggtcgcaagagatgagtcgtttatcagcatcagaggatttatgggatgagtaatttataggtgccggtttcccagatgtgggttttccagatacggattttcccgttctggctccgagctggggagagtctcctgtttcgcgtgtttcacgggtggtggcagagcgctctgaatcctgctttggcacctcactgcaagaagctgatgagtgctgtgcagagcggtcgaactccgagagtacggcgaagccgtcggctttcagctccgcgcacacctcgtcgtgcatcgcggggtcgtcgagggttatccaagtggcctcctcggccttcaggaagcggccgttctcgctgcgcttgcgcgcgcggatgatgtagccggccgcctcaagttccttgatgcccgccgtcaccgcgtccgcgccgtcgcgcacgagagaggcgaaccctttgatggtgaacacccactcggggttgccctcaagcgagcgtatctggcagtagatgcccttggccttggccgataggccgtggtcgaagaagatggtgttctcgacgtgggtgaaggagcccttgcccctgtgaagcacgtttcccatcacgcaccgccctgcctgtcgcggcgcgcctcggcctgctccagaagctcaagcgcccgcacgattcgcccctcgatctcgtctttggtggcatcaggatggaagaagcgcgcgatggatttgcggggtatcttgaactgctcgatttggttgggcttctcctcctccatgatggagcggatcagcgccggcgtgagcgagccctccttcgagaagcgcttcatcttgatagcctgagcgtgcgacggcgtggccgcctgggccccgatggcgtcgagaaggtgctcctgctcatcccgggaaaggaagctcacctccacggcggggagcatcttcattcggccctcgtccacgagcgcgaggagtccgggagcgaggaacgtcaaccgtatgaagcgctggatcctgtccttacttacaccgagctcttcggccagaatgtcacgcgacctcctgccgtctgacttgtgcgcaacttgcgcacaagtgaggtcggtgcgctgcccttggcgcttcatcgcctcaagccgcatcgagtacgcgaacgcccgctcgctcggcaggatggtctccctctggaggttcgagtccaccatcgctatggtcgcctcgtcgtcggtcaggctgcgcacgatgcacggaacgctctccagccccgcaagctccgccgcgcgcgctcgcctgtgcccgctcaccagctcgtagcgctccgctcccgacgcgcgcaccgtgagcggcaccagcacgccgttctcggcgatgctctccgcaagccgctccatctcctcgtcgtccctcacctggaagggatggcccgggaacgggtctatgaacacaagtgggatgtccgcgacccctggaagcgccgagccgtcgcgctcctcctgcgaggtgaacagatcgtccacgccggggaggtctatgggaaccctcttcctagccacggccgtccacctcctccgcgaggcgctcaaaggcacacgccgccttgccgtgcccgtcgtaggagaagatgctcgcgcccacagcgggggcctcggcggcggagaccgcgcgggggatgaccgtctcgaacacccggtaggcctccccgtactgctcgcggatggtctgctcaacctcgcgggccaggttgttcctgctgtccgagagcgtgatcaggatgccctcgacagaaagcgaagggttgatctggcggcgcacacgcccaacggtcttcagaagcgccgtcatggcggaggcggggaggtactcggccgataccggcacgagcacgctgtcggcggctacgaaagcgttcacggggattattcccagagtaggggcgcagtcgatgatgacgaagtcgtagtcggccttgagcggcgtgagccacacgttcatcagctgctcgcgcgacatcgccatgaggatgggcatctccatgccggcgaggtcgatgttcgcgggcacgaggtcgatgccctccttgtgggagaggattccctcgcggggctcaagggcctcgccctcgatcacggcgttcagatggtctgcgagcgtggcctcaagcgcgtcggggtccttccatccgagcgatttggtgaggtcgccttggggatcggcgtcgacgagcagcacgcgcctcccgcgacgcgaaagcgccgccccgaggctcaaggtcgtggccgtcttgccggtgccacccttctggttggcgacggcgatggtcctgcatggcatgatgggtgcctcccttctgcggtttcccgcaacgggaggtcagaacgcctatttcaagagagaatgcctgtttcgtaaagagcggagagacgggatgcgcacgggatggagacgggaaaaacaagggtttctcccagctatttgaggcaccccatatttcccgtgctttttgaaatcatgcctttcacctggtgttcttgtttcgagatgaaagctagattacaatggaaaacgcggaagacagggattcccaagcctgtaccgcgggttcgagtcccgtcgcccgctccagcaatcaacgaagggcatcggcgtttgtcggtgcccttcgatttttctcttgcagatgtccagttttgaaaacagttgaaatttgacgaactttttgacgaacttctcgccatgcgctaaactctaaaagcgattttgcaggtgacgagcggttttctcggaaatggagctcgggatggaaatagcttcccaagcttacaacgcgggttcgattcccgtcgcccgctccagcgaatcatcgatgccggccacctttcggggccggcatttctgtatacgggctgtttgttcgctgtggttcattgcgtagtagaatggacgtcgaaactcgatagctgcagggcctgcgctgtgcgggccgctgggaaaccggcgttgccgctcgccgtcttcttgcgctgaaccaacaggagcatatcatggaacgccgttttgacaccttcattttcgacctcgacggaacgctgctcgacacgcttcccgatctggtctctctcaccaatcgagccttgcgcgatgcgggttttcccgagcgaaccgaggaggagatcctgagttttgtcggcaacggcgtacgtgcgctcatgtatcaagccgtgcccgaaggaaccgatccggcccgtgccgaggcagcgatggagcgttggcgcgagctgtatcccgaatgcggcattgagctcaccaagccgtacgaaggcatggtcgaggtgctgtcccaattgaaggtgcagggcaagaaactcgcggtgctgtccaacaagttcgatggcggcgtgcaggagctcatccccgcgttcttttccgatacgttcgacgctgtgcatggcgagagcgccgacataccgcgcaagcccgatccgactgggctgctgttcactatggacgaaatcggagccgatccggaaacgacggcctatgtgggtgattcgggcagcgatatgcaaaccgcgcgcaacgcgggcgtgttcgccctcggcgtttcgtgggggtatcgtcccgaggaagagcttctcgaagaaggagccgatgcgatcgtgcgcgatccgagcgggattctcggcttctcgtaagcggggcaactgcgcatttgcgcgcggcgggctttggcgaacatccttcgcaaccgctccggggttaacgtttgtctctgaacgcagcaagggcgagctactgtgaacgctccgttcccatcacatggctattttatgggattcgcagttcaatgttagaatagtaagctcggaatcggcatgcactcccggtgtcgaattgcataccataggagagttcgtacatggcatcacgaaatcctcagtcgaaccgcccaccgcgttcttcgcataagccccaatcggtccgcgcagcgcgttccgcccgagcggctcagtcagggcgcatcgcttcgaagtccgccgcgcagtcgtttgcgcgtccggatgccaacaacacgaccaatcaccaggcatatcgcgcggcctatacgcccggaacgcagggcaagggagcaaacggcgcctattcgaggcaggctcccgcttcggggcagtattcccgcaacaacccccagtattcccatgctgcgaaaaagatgggcaagggaaagaagatcgcaatcggcgtggtgtgctcgcttttggttctgattctcggtgcaggtacggccgccgctctgtacgtcaacaacttgaacaacacgttgggcgggaacaaaaccgaagaggagaagatggccatccaggacgtcttggttccgaagaagagcttcaacgagccgttctacatgatgctcatcggatcggatgcccgagcggatagcgatgagatgggccagcgctccgacactaatatcgtcgtgcgggtcgatccgactacctgcacggttaccatgctttccattccgcgcgatacgatgatcgatatcgacggatacggaagaaacaaattcaacgccgcgtacaactacggcggtgccgaatcgaccatcagggaagcgagccagctgctcggcgttgacatttcccactacgcagaagtcaacttcgaagagctcatccagcttgtcgatgcggtcggcggcgtcgagataaacgtggaagagcagatcaacgatcccgatgcgggccccgtcatcatagagcccggtctgcaaacgctcaacggcgaagcggcgcttgtctatgcgagaagccgcgcgtacgttgacggcgattttacgagaacgacgcaccagcgcgagctgatcgaagcgctcatccagaaagtgctttcgttgcccgtgaccgagctgccgggcgttatcgagaaggcagcgcagtgcgtttccaccgacatgtcggttacggatatcattgcgcttgctacccagttccaagatctgggaaacctcaagatgtattcgtcgatgactccgtcggctatcgtgccgtacttgatcgacggcgtgtcgttcgtcgtgtccgatcccactgcgcttgcgcagatgatggagcttgtcgaggccggggaagatcctaccgcgattgacgcttcgtccaccttcacggaatcgatgataccgtcggggctcgggggagcgataacgtactcgaacgatgcctatgactacaacgattattcgaacaactactcatccgattcctacaacgattattcgtcgggcggatacgacaacggcggctacgacaactcgggcggatcgggctatgacgacggttcggggtcttcgggcgaaggatccggcggcgcaggcagcggctccggaggctctggcggcggcgaggcaggcggttcgggcggcggtgattccggcggccaatccggcggcgaagcgagcggagtttcagcggaggccgcataacgcgttcgccgatgcatttcgaaaagcggctggcaaacaatcaaaacgaccccgtcatcaattgcgatgacggggtcgttctcttgcgacgagcagtgctgcgactcgctagtcggcatacccgttcgggtttcccgattgccaccgccaactgtccgcgcacatgcgatcgagatcgtagagggcggtccagcccagttcgtctgccgcttttttgcacgctgcgtagttttccgcgatgtcgcctgcgcgtcggggcttgatttcgtaggggatctctttgccacaggctttttcgaaggcgtgaatcacttcgagcacgcttgttcccgtgccggtacccaggttgaaaattcccacaccgtgacgcgtgccgtcggcatcggcttcgccttcgatgctgccgagtccgatggccttgcccgtacccactttgccgcccatccattcgagcgctttcgcatggccgcgggcaagatcgaccacgtggatgtaatcgcggacgcccgtgccgtcgggggtggggtagtcgtcgccgaacacgccgactttttcaagcttgccggtggccacttgggcgacgtagggcaaaaggttgttggggattcccttggggtcttctccgatgaggccgctttcgtgggctccgatcgggttgaagtagcgcaacagcacgatgttccattcgttatcgccgatatagagatcggtgaggatttgctcgagcatgcttttggtttgcccgtagggattggttgcctgatgcttcgggcagtcttcggtgatcgggatgaactcgggatcgccgtacacggttgcgctgcttgaaaatacgaggttcttcacgccgtgttcgcgggcgacttcgcagagcacaagcgttcccgcgatgttgttccagtagtattcgagcggcttttgcacgctctcgccaaccgctttgaacccggcaaaatggatgatcgccgcgatgtcgttttcggaaaaaatacgttcgagcgcctcgcggtcgagaatgtctgcttcgtagaaagcaatgcgcgcatcgtcggcccccgtaatcgtttttacgcgatcgacggccttttcgctcgaattgctcaggtcgtcgacgatgaccacgttgtaaccctggtcgagcaactcgacgcaggtgtggctgccgatgaagcctgcgcccccggttacgagaacggtgatatcgcgaggttccttcgccaagctcatgtttgccatggatatcctttcgtgcagctaatctgcagttttcagactggctccatggtagcagcaggaaggccctttcggggtttcgtcaaaaaacgctcatgtggtcggaggccattcttcggagctcgggagtcgggtgcgaaacatacggcaagtcggcgtttacgatgtgcgaggaggtgtatcggcgttttcgggagcaagctttcgaactgtaattaaccttatccaagactattcttgacaaaggataaatagcaggatatactgcattccagtagaccggtatccttcctttctactcgtcttgcaggaaccgtcatccccctggcggttccacttcgtccaaaaggagcccttcggggctcctttccttttcgcgtgatctcccttgcttggcatgcccatgaatcctcgatgctttttgagcgcgcttcgcacgtggtggctataatgttcgaggtgtttcagctatagcgaacgaagccgcgccgaaccgattcgatgcggttgcgctcgcgttcatgttgaggagacaagcatggcagatgcaatacatttcggaaccgatggttggagagccatcatcggcgaagatttcaccaatgagaaccttgtgcgcgcggtcgatgctgctgcgaccgtgttcaaacaagaggcgcttgcagccggccggccggctgataatccgggaacgatcatcgtcggtcacgattgccggcaagatgcgcacgcctacgcgcagcttgctgcccaggttgccgcatcgcacggattcgcggtcaagctcacggctgattactgcccgacgcccacgctgtgctggtcggtcaaccaggaccccgaagcggtcggcggcatcatgcttacgagcagccacaatcctgccgaatatctcggcgtcaaactgcgcatgtccgatggcggcgcttcttccaaggagttcaccgatcgcgtggaggcccttcttgcagacgagccaaccgaagcgcgcggagcctatgtcgaagtcgatctcgtctcgccgtatcttgaggcgctgaaaagccgcgttgatcaggatgccatcagagcggcgaagctgcgcgtcgtggtcgatcccctgtacggggcggggcgcaggcaccttgccgggctgcttgaagatcttggcgtcgaggttgtggaaatcaacaacgccgaagacccgacgttcgacggcttgcaccccgagcccattccgccatgggtcgatcgcggcatggcgaaggtgaccgagctcgggttcgatgcctgcttcatcaacgacggcgatgccgatcgcatcggcgcggtggacgagcacggcaacttcgtcaatccccatcgcatcatcacgttgctcgtatcgcatcttgccgaagacaagggcgaaacgggtacggtcgtttccaccatcaccgcttccgccctgcttgctcgtcagtgcaagcgcctcggactcgagctgataagcacgccggtgggattcaagtggatctacgccgaaatggagaaaggcggcgtgatgatcggcggcgaggaatcaggtggcatcggcatcccctcccacgtcatggagcgcgacggtctgcttatggcgctgttgcttgccgaaaccatggcgcagcgcaacatgagcctcggcgagcttgtcgacgacatgttcgaaaagctggggcgcctcgagttcgcccgccgcggcttggctctttccgaggagcagatgaacgtgtttcgcaccgacatcatgccggtttacgaaaccggggaaatctgcggcaaaaaggttgtggacgtggatcgccgcgacggcgtgaaattcctgctcgagggtgatgcatgggtcatgatgcgcccgtcgggaaccgagcccctcgtgcgcgtgtacgccgaggcggcaacgaccgaagaggttgaggcgctgctcgatgccgccgcaacgatagtgggcgcataggcgccgttgcgcgacggtttcggtatgcacggatagatgcggatagaactagttgcgcgttgggcctgggaggcgcttgagcaagccccaggcccgttgtttttcttcgggtgaggcgagcatggattcgaaatcagcgaagccgatcaccgtgcgtccgagaacgcggcttttatcgggtacgggaatatcgcagcggtaggcgcgtgcgcacgcctgggcgcttgcctggtcggtgattaccatagcaaggggatcgagcccctcaacggccgagaaaacatcggtatcggaaagatcgttcggagaagcgccttcggcaacggggccggtaacgaaaaaggcgcatgctccgcttccgtatccgagcgcttcaacggagttttcaagggcatggcgggctttgtcggaaagaggggcatggctcacgatgagcacggggcacgaaaacgcgccatcgagccgcgctccgaagcgatcccacgtttcgacaagagaaacctcatacatgttactgtttgcggattttttcacaccgctccttgaacttaccgagcaatcgccgtataaagaagcataatagcaagaaacgggcggatgccgaagcggacggacggttcgatcggtgcattcgcataacaaaagaagggaaggcgccatgtgcaccaacggagttaacgtttcccagttcaagatgatgctcgagcagatggacgatcaggttgccctcaaccgtcgttggacccataagctgtaccatactgccgccgatgcggagtacgcgaagaccgcggaaaccctgaaggagatccagggcctgctcgacgaggctcgcgcgcttctaaccgatgctcaggacgctctcgataaggatgcgaacggcgcaagcggcgtaaccgtgaacctggtgtagccatgagcaacgacctcatgcggttttcggtcgcgatgcccgaggacttgcttgtgcggttcgaccaccttgttgcgcgccgcgggttggcgaagaaccgcagcgaagtggttcgcgatctcgtgcgcgatgcgctggtcgaagacgagtgcgcaacgccgggggcggaagtggtgggaacgctgacgatcgtgttcaaccaccatgcaagcgatcttcaggaaaagctccacgcgattcagcacgagttcttcgacatgatcatctgctcgacgcacgttcaccttgatcagcacaattgccttgaagccatcgtgctgcgcggcgaaacggggctcgtgcaggatgttgcgaatatgattctcggaacaaagggcgtcaagaacggccgtctcgttttgacgacgacgggccagttcatttaacgcgccttccgttttacggttcttcgatagaaagcacgggattatggacgatacggtattgctcggccacggcagcggcggcacgatgatgaagcgaatcatcgacgaagtgtttttcgaggcgtatgcaggcgaaagccttttaaggggcaacgatgccgctgttttggcaccggcttccgaagcgaagccctcggccgaggcgctcgcctacagcggttcgctttcgttttccaccgacagcttcgtggtcgaccctcatttcttccccggcggcgatattgggcggctcgccgtatgcggcaccgtgaacgatgtggctaccgccggcgccgagcctcggtacctcagctgcggattcatcctcgaggaagggttttcgatggatgatctgcgtcgcatctgcacctcgatggccgaggccgctcgcgaagccggcgtcgaaatcgtcacgggcgacacgaaggtggtcaaccgcgggcacggcgatggcatttacatcaatacgagcggcgtcggctacggctatgcggggatcgatttgggcggcgagaagtgtgcacctggcgataaggtgctcgtcacgggaacgatgggcgaccacggcataaccatcatgagctgccgtgaatcgctgagctttgcggccgatatcgaatcggatgcggctcccctcaaccatctcatcgccgaagtgatcgaagcggctcccgatgtgcgctgcttccgcgatccgacgcgcggcggcctcgcgtcgacgctcaacgagcttgctgcccaatccggaacggatatgaccatcgaagaggatgcggtgccggtgaagccggccgttctcggtgcatgcgagatgctcggatacgatgttttccaggtggcgaacgaaggcaagatggtgtgcgtggtgccggcgggccaagccgaggcggcgcttgccgccatgagggcgaacccctacggcaaagacgccgccatcatcggcgaagtttccgcgatgcagccggagcgcggcccgaaggtttttctgcgcacggcgttcggcagtacgcgcatcctcgacatgctggtgggagagcagcttccgcgcatctgctaaaccgtgtccgccgtgcggcccagcgcgttgggcgggcgtcgcacggctacttatagagcgaactgcgaaggcgcggcatatgggctgcgccttttttgtatatgggcgcatgggcaccgattggataccaaggcacaagcaagtacctgatttacttcgccctcttcgcggctcatactgaggcatcgatcgcgcgggcgaagcggttgttgcgcatccgcagctcgatgcgcgccgtctgcccggcggcttatgcagcaggacgcgttttcgcggcggcgatcgatgcgtgactgggtatactgatatcgaaggaaggatgcaatggacgcaaaagcgaaaaaatacgtcgacctattccgatcggtcaagatcgcatcggcggcgacggtcgacgagaaggggcatccccgcacgaggatcgtcaacgtgatgctggctgatgattcgggaatgtatttggtggccagcaagggcaagccgttttacaagcagatggtcgaaaccggtgaagtggcgctttcggccatgtgccctgaatgccagagccttaagttcctagggaaatgccgcctcgccgacaaggaatggcttgacagggttttcgaggaaaaccctgggcttaacgaggtgtatcccggcaagacccgctacattctcgatgctttccacgtttacgaagggcaaggcgagtggttcgatttgctgcaccatcccatcagccgcgaagcgttctcgtacggaggagcggaaccggagcattccggatttctcatcaccgaggagtgcatcgaatgcggctcgtgcctcgaaacgtgcccgcagcagtgcatcgaggcgggatcgccctatcgcatagaatggcagcattgccttcagtgcggcgcatgtttcgacgcgtgcccggctggcgccgttcgaaggctgcatccctgatatggaatttctgcaagaagtagctgcgctgttcgtcgatcgagccgactggttcgcctctcttctcgtcgagcatatagcgctttccgctattgccatcgcaatcgcaggcacgctcgggctggcgctcggcatcctcatcgccgagcatcgtcgattcgccccgttcatcatcggcgtctgcaacgtggtgtacaccattccgtcgatcgcgcttctcggcctgctcattcccctgctcggcgtaggtggcaccaacgccatcgtcgcgctcatcatctacgcgctcatgccgatggtgcgcaatacctacgtgggccttaccgatatcgaccccgatatcatcgaggccgcacgcggcatggggtcgacccgcatgcagacgcttgtccatgtgaggctgcccatggccacgagcgtgatcctcgctggccttcgctcgatggtcgtgatgaccatttcggtcgccggcatcgccgcgttcatcggcgccggcggtctgggcgtcgccatcttccgcggcatcacattgtacaatcctgccctcacgtttgcaggtgcgctcatgatcgcgctgcttgcgcttgcagccgatctgcttttggggcttatcgagaagcgctataagaagaagaggagactgacggttcatgaaaaacagtagaacgaaaggcccgcaggtgcgcaggcggctgccgcttatgctggcccttgcgatggttttcggcattgcgctcttcgcgcttgcggcatgcgcttcggatggcggcgaggggggatcgagctcgtcttcggcagacccgatcgagatcgccaccaagcccatgaccgagcagtatatcttaggtgaaatgctcaaggctctcgtcgaggatgctggctacgaagcaaacgtgaccaagggcatcggcggcggaacgaacaacatccaacccgccatggagcgcggcgatttcgatctgtaccccgagtacacttcgagcggttgggttttggtgctcgatcatcaggccgaaggcgttgccgatgatgagatgctcgaaaagctcaaggaggaataccagactaatttcggcatgacgtgggttggcatgtacgggttcaacaacacgttcaccgttgcggtgcgtgatgaggttgcgcagcaatacggcctcaagaccacgagcgatctggcagcggcggcccccgaactcgttttcggcggaaaccccgattacatcgaacgcgaagacggctttcctgtgctcaccgaaacctacggcctttccttcaagcaggtcatggatatcgatatcggactcaaataccaggccttgcgcaatggcgatatcgatgtgacgaacgggttcacaaccgatgcccagctggctgcgggcggcgtgaccacgctcgaagacgataagcacctgcaggtgaactacttctgctcgacggtcgtgcgccaagatgcgctcgacagccatccagggctcgaagacgccctcatgaagatggacggcatcctgagcgacaaggaaatggccgagctcaactacaaggtcgaggtggaaggccaagacgaagcgaaggttgcgcgcgacttcctcgtttcgaagggagttctcgaaggctagccatgggaagcgatgcggagaaaaccacgactgagcgcgcgatgagcgcacccgatgacgtcgatgcgatcatcgaactcgatcatgtggaaaaatcgttcggcgatacggcggtgctgcacggcatcgatctggcggtgcgccgaggcgagttccttaccatcgtcggacggtcgggctgcggcaaaacgacgctgcttaagatggtgaacgcgcttgagtaccccgatagcggccgcgttctcgtaaacggcgaagaggtcaaggagtccaaccgcgtcgagctcaggcgctccatcgggtacgtgattcagagcgtgggcctgttcccgaacatgacggtgggcagaaacgtcgcctacgtgccgcgccttacccgtgcatggtcgaaagggcgggagcgcctggaagtggcgcgtctgctcgccgcagtggggctcgatcccgagcttgcctcgcgctaccccaacgagctttcgggcgggcagcgccagcgcgtcggcatcgctcgggccctagccgccgagccgctcatcatgctcatggacgaaccgttcggcgccgtcgacgagatcacgcgccgctcgttgcaagatgagcttctgaacttgcagcgccgtctcggtttgacgatcctcctcgttacccacgatattcgcgaggccctcaagctcggcgatcgcgtgctcgttatggaagagggtcgcattgcgcagctcgccgagcctgacgagctcgtatcccgacccgccgatgcctttgtagaagagctcatcggggggtaagcgaagcgcgcttgcttgcggaatcgcctggcgggttttcgacaacccaagcatggtccagccggacacctggctggaccaattgcggtaacggcgcttcagggcgagaagcgccgcatttgcgttgcggcggcgttgccatcggaagatgtgcgttgcattgcggaagggaattcatgaacgagggcgcccttgcttttgaaacgatgcgcttgatgcctcgtcgatcaggcggtatgcaacttctacccaaaattcgcgcgctgtaaaaccatgtcgtttgtccgcaatatcagccgaaacctgaaaaatctgcattttgccttgcaattacagtgaggaatggtatcttgcgggcagaaagtttttggtaggcgagggttcctccaataagaattctttcagacgagaaggagaataatatgtcccatccggttatcgaagccgacgagtgcgtcggctgcgggatttgcgttgatgcatgcccgcaagaagtgcttgaagtcgttggcggcgtcgttgaggttgtgaacgaggatgcttgcatcgcctgcggcgattgcgtcgaggaatgccccatgggcgccatccccgaggttatcgaagactagccgtcgaaaaatctgcttgaagcaagctcccggttgcagaggcaatcgggagcttttgcatttcgggacatgtttctttcgcctggcttgccgctagcgattcgggagccgttggctattcggattctcaactggcaacagcggatattcggaaaagcccgggcttcggtttatcgataggggtcggcatccgtgtcttggtggcggtctgcgccagacggtcgctggcgcagaagagatgctcgcccaggagaagcacccgtcgcagcgcatgccgttcgccaaagcgcgccgcccgaaggcaggcctctcggcgagcgaaacgccaagaggcctcgatgtttgttacgcccagctatcaagctgcccggcgtgttcggcggctagataggcgaaaaccattccgggaccgttcgtcccgcctgcgcccgtgtaatactttcccggcgttccgcatccggttgtgttgccgcatgcgtagagacggggaatggggtttcccgccgtgttgatcgcttggccgttctcgttgatctggatgccgccttttgttccctggtacgtggggacgatctcggcggcatagaaggggggctgcgtaaggccgccgagcgtcggcccgctgttcatcatgttgtagttttcgaactccgattcgccccgatggaagtcggtgtcggttccgttttccgcatcggcgttgaacttctctacttgggccttcagtccctcggggtcgatgcctattttctcagccagttcttcgatggtgtctgccgtgtagccccattcgggaaggtctccgtcaaggccgacgccgaagaatatgtctcccttcgaagggtcagccaatgattcgcgcacggattggtcgcagatataccaggcgggtacattggtcagctccatatcgcctgtcgtcgattgcccttggaatccaaaccagagagaatcgtaatcggaagcctcgtcgcaaaaacgcttgccttgacgattgacgaacatcgatcccggtttagtttgataggcatagagggaaaccttggtagagcataccttctcttcgtaatactgctcgctcaatgctttgaagtttatctggccccagccccatggcatcatggtcaggttggccccaacggcttgcgccatgagaatgccgtcccctgtagactcggggacgcacatgcagcccttgacggggatggggtgatacgcgttgagcatgtcttcgttgtaggagaatccacctgttccgacaaggacgcccttgttggccttgatggcaatctggttgcccttcgcgtcttcggcgataactccaagcacctcttgaccgccgtctgaggttgggcgtgacacgagtcgtttggcaggcgtttcggtcaaaattttaccgccgagggaaactatctcatccgcttcaggctgggtgaagtgcgccccggaacgcacgccgtcgattacgcaggaaagcgatcgcatgtcgcggctggcaccctcccattgggcatggtagtcgatgcgagggctgacggaccattcgcaacctgttttttctgcaatgaagttaaccatttcggaagctctgtcgatgtacgcatcgatgatcgcttcggttgatagtccggcggcgactttggtcatgtactttttagcaaggtttctatcgtctttctcggtggagaaatcgttgcagggaacccagacttggccgcccgacaaagccgtggttcccccgatggtttttgctttttcgagtacgataacggacatgccgtcggcagcagccttgagagcgcccgtcagggccgttcccgttcccagtacgacgaagtccgcctcttcgtcccatgtttctggaatggccgaatcggccgatgcggaagccgagctcgcattcgctcccggccccgagcacccggcaaggccgaaaacgcttaaagccgctgcggacaaccccgccgttgtaataaactgcctgcgattgatgtctttcataaatgccctcctagtatatggcgtgattcgctatccgaacctgttgccatgctaggcgcgtttcgagagccgcccatcgaccagaagggctaaacccatcgacccttttggtctatattcaaatacttcgcggaacaatcggagactttgctacactgtgggcgagggggtctctatgggaacgcattcgccagaaaaaagcgcaaagacgattgcggcggtttcggctagaacggcggtaccggccgggttcgcgatcgcctggttgttcgttgtctttctctcggcaacgctatatcgaaacagcgcagatgttggatcggcaaccctttcgacggtgttctgttcgatctttttcttcgctgcgtcggcgcttgctctcggatttttcaatacgcagaagctgagcgagcacaagcggaagctgcatggtgcgggtcttgctgttttaaccggcgcatcggtgctttttccgttgcgcggccttgtcggaataagcgattgggccgcccttgccgtcttcgggctgcttgcgggaatcggcttggcgctcgtggttctcttctacgtgtccgtcctatcgaccatgtcgtttgccgccgtagtctcttggtaccttatttctctgactgcgggggttgggttgttcttcctttatatgatcgcagtgccaaccgacctcgtcgcttcgtttttttggcttttgccggctctatcggcaggtctgtccttcgccttatcgcgaaatcggctcgagaggcagagcatgttcagcatgtatgcccgttcgcttgcccagagccaattgcgagctatgttcgaccatagggcgtttccgtactttatcgttgtaagcgggttcttgttcggctactgctataacgtctatcctaaatcgactcgtttcgcgggcgtctataccgaagccgcgttcgggcttgtaagcttggctgcggttgccctgcttgtcgtttgccttgctgttgtgggcgttctcattctcgttgggagattggcgaaacgcaaaagcgcctatgttttgggcagcatgcttctcgtcgccctcgcggtcatgtatttttgcctaccgaacatgccaagcagctggatgctgttcgtcatgctcgacggtgcggccgtttctaccgcgctgttcgcgcttctcggggttcttctgcgcttctctttgggcgatgcaaagcgctttcgacagttttttctcttgcttgcgggaagcgtagtcgcgggtgcgagcatcgcggccctcttcatcgaaacgacgatacccgatccgatgatcgtcgttcccgagtttcttcgcgatgccgtgatcgtcggcaccccggcgatagggttcatcatcctcgccctcatgttctttctcttgtcccaaaacgcttttttccccgctgcgacgggcgcccaacccgatgcaatcggggtctccgacatacatgctgcacgtgaagtgattgccgagcgcttttcgctgaccccacgtgaagaggagatattggggatgctcctgcttgggcgaagcggaccttatatttccgaagacctgtatttgtcgaagagtacggtaaagacgcatattcgccatatttacgataaaacaggcgtgtcgtctcgacagcagctgatcgaccttgcccatggcgtgcgcgaaggcgaatccggaaaataacagaaacctggcgcggccatcgaaaccgactcccttgcaataaatcttacgcgagcggaaacgaagcaacgaaactcttttaacacggcaacaaagcggtgaacatccttgcgcgttttatccaaaagtataaggtgtaaccaagttcaagccgtcggactgagcctgcttgagcgaaagggcgccatgagtcatcccgtggaacgttcacatatcctatgaaatgtgtacgaaagtaacgtgaagatgacaattgagaaattctcaaaagtaaaatggcaagaaacttgacaacattagacttagattatatagtttcagtcatcggaaaggttcgcatgcgcggacctttgcatatatgagattacaggttaagcaacagacgtaagcacataacgaaggcaacaaactcagagtgagaggaagcaataatggcaaagatcatcggaatcgacttaggaaccactaactcggcgatggcggtaatggaaggcagcgagcccgaaattctggtcaacgccgaaggcgatcgtaccaccccctccgtcgaaggcttccgcaaagacggcgagcgcgtcgtcggcaaagcggcgaagaaccaggcggtcaccaatccggaaaacaccgtttcgtccgtgaagcgctttatcggccgttcctacaacgaaacaagcgaagagcagaaaaccgtcagctacaaggtccagaagggcaaggacggccgcgccgtcgtcgacatcgagggcaaggattacacccctgaagagatttcggctatggttctccagaagctgaagaacgatgcggaaaagcaactcggcggcccggtcacccaagcggtcatcaccgtccccgcgtacttcaacgacgctcagcgccaggcaaccaaagacgctggcaagatcgccggccttgaggttctccgcatcatcaacgagcccacggctgcagcgcttgcctacggtctcgataagacgaacaaggatcagcagatcctggtattcgacctcggcggcggcacgttcgacgtttcggtgctcgagctgggcgacggcgtcttcgaagttcgttccaccgcaggcgacaatcacctcggcggcgacgactgggatcagcgcgtcatcgactggatggccgacaagttcaaatctgaaaacggcatcgaccttcgccaggacaagatggccctgcagcgtttgaaggaagctgccgagaaggcgaagatggagctttcgtccaccacgcaggccaacatcaacctgcccttcatcacggcagacgcctcgggtccgaagcatctcgattacacgcttacccgcgcggagttcgagcgcatcaccaaagatctgctcgatcgctgcaagaagcccgtcgagcaggcgctgaaagacgctgatctcaaggcaggggacatcaacgaggtcatcctcgtcggcggctccacccgtatgcccgccgtgcaggaactcgtcaagcagatgaccggcaaagatccgaacatgtcggtgaaccccgacgaggttgtcgccatgggcgcagctgttcagggcggcgtgctttccggcgacgtcgaaggcatcctgcttctcgacgtgaccccgctgtcgcttggcgttgagaccatgggcggcgttatgaccaagatgatcgagcgcaacaccacgattccgactcgcaagaccgagatctattcgactgcggcagacaaccagacctccgtcgaggtgcacgtcctccagggcgagcgcgagatggcttccggcaacaagacgcttggcaagttccagctcaccggcattccggctgcgcgccgcggcgttcctcaaatcgaggtcacgttcgacatcgacgccaacggcatcgtgaacgtgtcggcaaaggatctcggcaccggcaagcagcagcagatcacgatttccggctcgaccgcgctgaacgacgacgaagtcgatcgcatggtcaaagatgccgaagcgcatgccgaagaggacaggcgccgcaaagaagaggtcgagatccgcaacaacgccgatgctcttgtgaacgcaaccgagcagacgctcgccgaggttggcgacaaggctcccgaggatgtgaagaagcaggccgaggaagctatcgccgaggcgaagaccgctctcgagggatccgatatggatgccatcaaggctgcaactgagaaaatgcaggctgctggatacaagcttgccgaagtggtgtactccacccagggcgatgctgcgggcgccgcggcaaccgctgcggagacgaccccggctgacgataccatcgaagcggactacgaggttgtcgaagacgacaaagaagggaagtaatcatggctgtgcccgataaggacaaggtcgtaggaacttctcgctcacaagcaaacccgggcggcggccctgcccccacccattccccctcccccaatggggctgccgccaaagacgaaacccgtcaggcagccggttcgaaagagccggctgcggacggggaagcgtcgaaggatcagccggcgcaagccgacgaggcccaagcggttgaggccgaggtgctcgatcccgaaaccatcagcgaactcgaactcgagtcggcgctcgtggctcaagccaaggccgaagcggcggaatggcaggacaagttcgtccgtctgcacgccgagtgggatacctatcgcaggcgcactgccgaccagcgcgccgaggagaaggcccgtgcggctgaaaagctcgtcgagaaccttcttccggtgatcgacgatttcgaacgatcgatcgactatgcgcagaagaacggcgagacgggtcttctgagcggaatagaagcggttcacgccaaattcgtcgatgccctcaagcgcgatggagtcgaaatcatcgatccgaagggtgaagcgttcgatgcgcttgaagctcaagcggtcgcgacggtacccgatgcgtcggtgcctgacgaaacggtggccgatgtttatcagaagggctacaaaatgggcaagaaggtgctcaggccagctatggtaacggtaacaaccggcggaccgaagcgggaggtcccgaaagagaccgaagaaaagaagtaagcgagaggcgggcgagcgggttacatgcagcccgcttctgtttctaggacaaaatatttgacatgccgccggataggcggcgaagaaacatgaaagcgaggtggacgcatggcgacgacaacgacaccggattattacaagacgctgggcgttccacggaacgcaacggccgacgagatcaagaaggcctatcgcaagctcgcgcgcaagcatcatcccgatgcgggcggcgacgaggcgaaattcaaagaaatcaacgaagcatacgaggttttgagcgacgaaaagaagcgcgacctctacgatcagtacggaacagccaacgaaaaccacattccgcaaggatggggaggcgcccaaggcggcaacccgttcggcgcagagggtttcggcggctggggcgatattctcgaaagcatccgtcgcggcgaaggcgcattcggcaccgagtgggatttcggcggcttcggaggcttcggcgggcaagcccaaccgcgtccccagcgcggccaggatatgaacgtcacgctttcggtgagtttcgacgaggctttcaaaggcgtcgaaaagcgtgtgagcgtgcgggtgccgggcaaagccgacaaagaaacgctgacggtgaaggtcccggcaggcgccgtggacggaggccgcttgcgcttcaagggcaagggcggtctcggcgaaaacggcggggcgaacggcgacctgcttatcaccaccaagatcgaatcccatccgtactattcgcgccagggcgccgatgtgaacgtggccctgccggtcacggttgccgaagcggcgctcggggcgagcatcgtggttcccgcgcccgacggcacgaaggtccgcgtgaaggttccggctggaacgcaggacggcactgtgcttaccatcaagggcaaaggcgctcccaaggtaaagggcgaaggcagcggagatttgaagatcaacgtcgacgttgtggttccgaaggccatgaacgacgaacagaaacaggccatggaagatttcctggctgcaacgaaggacgacatcaggagttggtagtgcgatgactgacaggaatagaccgctctacatgatcagcgtggcggcagagcttgcgggcgtgcatccccagaccctgcgcacgtacgagcagaagggccttgtgaccccccagcgcacgagcggcaacaccaggatgtattcgcaggccgatatcgaacggctcgagctcatcaacgagttgaccggcgagggaatcaacctcgcgggcgtcatccgcatcctcgatcttcagggaaggttggaagagcgggatacggagctggacgacctgcacaaaaaggtgcggcgccttgccgaccgcgtgcatgagctcgaaacgcgcgaaagcgtgaactcgctggttcgcacggagccgggttcgcttgcgctccgtcggcttccctgagaacgaatccgcgccaccgcctcccggcgcgtggcgcgtcttgccggctgcctcggcttccgttgcgccggctgctgtaaaccgatttgccttcatcagagaatgagggcgaaggaggaatgttttatgaacatgggcaatttgaacaaactcgccctgactgcgcaggaggcgctgcagcagaccatcgtcatcgcctccgagaacgaagcatcgcaggcggagcccatccacatgctgaaggctctgctcgagtcgaaggagaacaacctttcggctatcatcaaacgcatcggcgccgagccgttcaacctgctcgccaacgtcgatgctgaaatcgcgcgcatgccgaaggtcagcggcaatcccaacatgatgagcggcgtgcccggtccggcactcatgaacctcatcgacaacgccgtgaagatcgccgaaaagctcggcgatagctatgcgacaagcgagcacatgctgatcgccttgtcagaagacaaaggcgctgccggcaagatcctttccgttgccggagtcacccgcaagaacatcgaagctgcctacgaggatctgcgcggggatacccgtgtaaccgatcaggcggcgaaaacgcagttcgaagcgctggagcaatacggccagaatctgactcaaatggcgcgcgaaggcaagctcgatccggttatcggccgcgctgacgagattcgccgcaccattcaggtgttgtcgcgccgaacgaagaacaaccctgtgctcatcggcgagccgggcaccggcaaaacggcgatcgtcgagggcttggcgcagcgtatcgttgcgggcgacgtaccctcttcgctgcaggatcgcgatatcgtcatgctcgatcttcccgctatgatcgcaggtgcgaagtaccgcggcgaattcgaagaccgtctgaaggccgtgctgcgcgaggtgaaggattccgatggccagatcatcttgttcatcgatgagctccacactatcgtgggcgcaggctccacgggcgatagctccatggatgccggcaacatgctcaagcccgcgcttgcacgcggcgagcttcacgccatcggcgcaaccacgcttgacgagtatcgcaagtacatcgagaaggatgcggctctcgagaggcgtttccagccagtgctcgtgggcgagcccaccgtggaggacacgatcgcaattttgcgcggcttgaaggaaaagtacgagatccatcacggcgttcgcattaccgactccgcgcttgtcgccgcggccgagctgtcgaaccgctacatttccgaccggttccttcccgacaaggcgatcgacttgatggacgaggcggcgagccgcttgcgcatagagatcgattccatgcccgaagaggtcgatgccgccgagcgcaagcttacgcagatgcagatcgaagagcaggccctcatgaaggaagaggaccagcccagcaaagagcgccttgaagcgttgcggcaggagatcgcaaccgcacgcgaagcgctcgataagcgcaaagccgagtggcaaaacgagaaggacgccatcgtcaacgtgcagaaccttaaggccgatctcgaaggagctcagcttgaggaagagcgcgcaacccgcgaaggcgatctttcgaaggcgtccgaactgcgctatgcgcgcattcccgagctgcagcgcatgctgcacgaagccgaggaaatgctcaacgtgcgtcagcagatgggtgcgatcctgaaagaagaggtttcgagcgaggagatcgccgaagtcgtatcgacgtggaccggcattcccgtgtcgaagatgatgcagggcgaaatggccaagctcgtcgatttggaggacaggttgcacgagcgcgtgatcggtcaggacgaagcggtgtcttcggtggcgggtgccatcaggcgcaatcgcgccgggctttccgatcccgataagccgatcggcagctttctgttcctcggccccacaggcgtcggaaagaccgaacttgcgaaggccctcgccgaatatctgttcgatagcgagaaggccatgatccgcatcgacatgagcgaatacatggagaagttcagcgtgcagcgcctaatcggagctcctccgggatacgtgggttacgacgagggcggtcagctcaccgaagcggtgcgtcgcaagccgtactcggtcatcctgctcgacgagatcgagaaggcgcatcccgacgtgttcaacatcctgctgcaggtgctcgacgacggacgtttgaccgacggacagggtcgcgtggtaagcttcaagaacgcgatcgtcatcatgacgagcaacgtgggatcgcaattcatccgcgagtttgcggagcacggcgacgagaaggcgatgaaccaggccatcgaaggctcgctgcgcgcgacgttcaggcccgagttcctcaaccgtatcgacgacacggtggtgttcaacgccctcacgatgggcaacatcgagccgatcgtcgatctgcagctcgaagaagtgcgcgagcgcttgcaggaacgtcgtatttcgctcgacgtgcgtcctgccgcgatggaacgcctttcgatcgacgggtacgaccccattttcggcgcacgtccgttgaagcgactcatccagaaggtggtcgtggacgcggtggccgagaaaatcgttgcaggccaattgcctgacggatcgacggttgtcatcgacatcgaccgcgatggcaactacaactccgaggtggtccagaccgcgcttgcggaataggcggcgctgcacgacgcgaagccgatgtttcacgtgaaacatttgttcgtattcaggacgggagaagcaaacctcccgtcctgttgttttttcacagaaccgcatatcgggcgcacttgtactagaataccctcatgcggaaacgaacccgaaagatcgagcgcagcatcaaggccccaattttggggtttggcgtgctgttgacgagcatactggtgtttctgctcttcctttgcatccttatcgtgttggcgcgcgtggtgcttgggtagctatgggcggtttcggcagaagggctgggcagcgggcggcgtaggcggctctttgcgcaagagatatgtggcagcgtttttctttatatgatgtacgggttatcggacactatcttggtgttctgatcctgttcttctcgttcgcgcttctcgttccctttgtggttgccatcgcgtgcggcgaatggaagccggctacccactatcttcttacgatcggcatcgcgctcgtcgtgggaagcgggctgcgttttttgcgcatcgaacccggccgtttgaaccgacagcaggcgttggcggtaacggggcttgcttggatcgtcatcgctcttgtggcggcgattccgcttcacctttcgggccactacgccaatccgctcgatgcgttcttcgaaagcgtttcgggcgttacgacgacgggggctacggtcgttcaagacctcaaccacctgtccgttgcggataacacgtggcgcttcgtcatgcactatatcggcggcctgggcctgatcgtcgtcgcgatgtcgtttgggctgtttggaaagcgcgcaggggcgagcctgtattcttccgaggggcgcagcgagcacgtggtgcccaacgtcgtgcaaaccacgcagatcatcgcgaagatttcgctcgtggtcatcttcattgcaacggcgctgctcacgattttgtgcatcttcctcggcatggagccgatacgggcgattttccagagcctctggcttgccatctcgggattcacgacgggcggcttcgcccccatgggggagagcgtgctgtactaccattcgattggactcgagatcgtgctcatggttctcatgatcataggcaccatcaacttcgtgctttacaccgaaatcatccgcggtcgaacagcggcgttttttcgcgacctcgagatccgcacgatggtcgtgtggctttcggtcatgacgctcgtgttcgccgccgcgctcactgctacggcgtcgttttccgacttgggggcaatgctgcggcgcggcctgttcatgatcatttcggcgttctcgacaacaggcttccagaacatcacgtcgaaccagttgaccacggtgttctcatcgggtgcgtttctcgtcatcgccgttgtgatggcggttggcggcagttcgggcagtacggccggcggcatcaagttccagcgcatcggcgtcatcgcgaagtcgatcgtggtcaccatcaaagaagcgcttgcccccgattccgcacgcgtggtcgtcgattacaaccatatcggccgtaggctcatatcgcctgagcttgcgaaaaacgccatgacggtgtttgcgctctacatcatcacctacgcgatcggggcgcttgtcggcatcgcatacggctacgacgcgacgcaggccatcttcgaatcggttgccatgacgagcaacgcgggcgttacttcgggcatagttgcgcccgacatgcccaaggtgctcgagacggtctacattttccagatgtgggcgggtcgtctcgaattcgtaacgctgctcgcgctcattgtcgagatcatcgtgtcgttcaagccccgtcgcagaatcggggtgaacgcatcatgatcgggctttcggctccaatgcgcctggcctcgaagggcgttgctgcgcttgctctcgcgttgtcgctgtacatgtctccagcggttgcgcttgccgaaggcgaagatgagaacaccgtcaatccccaacagctgcccgacagctcgttcatcttcgatacgagcattgcagatttaagctcggccgattcgtattacgacaatcagaccgtgcagatcgtcggcgaggccgtcggcgattcgatcgccgttgagggagatcccgaccatcgctggatcacgctcatgtcgcgcgatccctcatcgaacgcatcgatatcggtttttatgaccgatgaacaggccgaacgcattgatgcgtttgggaagtacggaacgacgggaacgatgctgcaggttcgcggtaccttccatctcgtgtgtcccgagcacagcggattgaccgatttgcatgccgaacacgtgagcgtggtcgataagggcaagcaccacgaagagccgttcagcctcgaagcgttcatccccggcgcagttgtcgttgcggtggggctcgtggttaccggcgtgttctactggcttcgggaaaggcggcgttaagtgctcgaaggccaggttgtcaagctcgacaggggttacccgctcgttcgcacggaaacgggagacgagcttcggtgcaagcatgcgacggctctggtcaaaggagagaaggtgcgcgccgttatcggggatcgggttttgctcgacatccccgaggcgcatgacaaggcgatcatcgccgaaatccttccccgcaaaaccgaattcgttcgcaaggatcccaccgagcgggcgcttccgcaggttcttgccgccaacttcgatacggtgctcatcgcccagcccatcgcggatgtgaatctcaggcgccttgaacgcgaactggtgcttgcccatgaaacgggagccgatgttgcggtcattctcaccaaggccgatcttgccgaaagcgacgaggatatcgaacgcatcgcccgcaaagtcggcgatctggtgggtgctcgggatcgggtgctggtggtttcggcggaggagcctgaaagcatcgatgcggtgcgcgactttgtggcccccggcacaaccaccgtgctcatcgggaagagcggtgtggggaaatcgagccttgtgaacctgctcgtcggatgcgaggtgcaggagacggccgaagtgagggaggtcgacgggaaaggacggcacaccacggtgagccgcgagatgatcgacgtgcccggcggcgggtgcgtcgtcgatatgcccggcgtacggggactcggcctttgggatgcggaaagcggaatcgaagcggcgttttccgatatcgaggaacttgccgcctcgtgcaagttcagggattgccgccacgaagccgaaccggggtgcgccgttcgccgtgcggttgagaagggcgaactttcacaaagccgcctcgattcctaccatgccttgcgcagcgaaaccaacgagattcgcgaacgccgtgaagaggcgtcccgcatacggtcgagaacgggccacccccgacgccggggatagcccgaaccttggttgcttctagccctcgatctcttcggcgaatcgggcgatctctgcggatgtgagcaccggctcggttggcttgccttcgatgcgacggaaaaagaaccgcaggtaatggcccagaacatacagcaccatgacggttgcgagaatggtttcgatcgaaatgagcatgtgagcggccatgaaaacgggacctccgaaacccagcccttcgaaatacgtgaccgctttgagcagggccgaggccgagatgacgaatggaaaggtcatcgccgcatagctcgggtagaacttgattttgagcagcttgggcagctgagtgagtacgagcacgaggaacagctgtgccagaacggccatgatgccgaccatgatggcattcggttccgcagcggatgcaaggtatcctgcaagcgaaaggctcatcggcgccgcgtagatgcaaaagaggggcttcgatggttcgggaacttcatgcttgatgtagcgaaggccaacgatgacgagcagcgcgaggtagagcgcgaatccaaaccagaaaatgacagcgcccacggcttccatgccgaaggtcggcgaggtgagcgatgctacgatgatgcccacgtaggcgatgaagtgcgtggggaagacctgcttgagatcgaagtgcaaggtgaaggcgatggtgaaccacgccataaggcagaagtggccgatgacggcgatgctccaaatgacgaaggcggcatcgtaggcaagcggtgccaggtaggttgccagctgcatggtggtcatgaagagcgtcgcgctgaccgcggcgaacacggggtttttcagatcctctctgaccatggcggggaacaggatgatctttgcggcgaggaaggcgaccatgatgagggaaagcacgcctgcgatgaggtgaaacgcttccgagagcggctggagcaggatgccaagggcagcaaggccgagcgctactccggcagttggaatcggaaccttttggatgacgcttttcacgaactatctcctaacctggccagcagcccgaatcgttcatattgctcggtattgtcccactgccctggcaaaaatagaacttattaattattatgtatcaataataaattcttatacagaaaaccactgataagagaaacggatatcatgcaggattttaggacagagacgttcctcgacgtgtgcgatacgctgagctacacacggacggcacaaaggctcaatattacgcagcccgccgtttctcagcacgtttcccatcttgaaagcgcctacggggcaaagctgttcgattatcgcaaccgtcggctttcgctgaccaaggcgggcgaggtgctgcgcgacgcgcttgcggtcatggtgcacgacgagaggttggtcaaggagcgcatcgcttcgctgtcgggcgctcgccgaacgcttggcttcggcgttacgatgaccgcaggcgaatacgtgatagcccgcccgcttgcccgattcctgctgcagcgtcccgatttgcaggtgcgaatcgttgcttcgggcacggaggacttgcttgcgatgcttcacgaaggaagcctggattgtgcgcttgtggagggattcttcgacaagggggaatacgatggaagcgttttctgcacggaggaactcgttgcggtgtgcgcgcccggaagcgatcttgtcgaaacgccccgatctcttgaagatttgctcggcgagcatcttgttgtaagggaggacggatcgggaacgcgcgcggtgctcgagcacgcgctggcagcgcgcaacctttctcttgacggcttcgcccgaaccactgaagtcacaagcatcaacatcatcaaaacgcttgtcgcaaacgggtacggcatcgcgtttctctacgaatctgccgtacgggcggattgcgaagcgggcgtcctgcagaagatcgatcttgccgagccgcccatttcccatgacatgacgttcatctggctcaaaggaagcctgttcgagagcgagttcagagggcttgtcggggatctggcaagctgcgcgtatgcaagcgagtgcggagacgccccgtcaagctagccgaaccaaacctggaatttggggatgtatcccatgacgaggatcaccacgatgagggtcgggatgccgaatttcacccagaggtaagcccacttcgggaaagcgatgccctttcccgtatcggcttcggcaatgaaattcttccaaccccagccgcgtctgctcgtgcagaaaagcacgtatatgaggctgccgatgggcaggatgttgttcgatacgatgaagtcttcgatcgactggatatctccgatgccgggaatggctgctcccgacagcacgttgaacccgagggcgcagggcagcgacagcaagatgacggcgacgccgttgaccagtacggccttcttgcgagaccagccccataaatccatcgagaagctcagcaggttttcgaacacggcgataatggttgaaagcgccgcaaaactcatgaacaggaaaaacagcgtcccccaaagctggcccatccacatttgctcgaacacgctcggcagcgtgacgaacaccaggctcggtccttcgccgggattgacgccgaacgcgaagcatgccgggaaaatgatgagcccggccatgaatgcgacaagcgtgtcgagtacgcccacgctgagcgcctcgccggtgagccgacggtccttcccgatatagctgccgaagatcgccatggccgagattccgagcgagagcgtgaagaacgcctgccccatcgccgcatagaccgcttcgccgaaagaggccagttgttcggccgttgtggcgcccgcgaacaggcgcgagaaatcggggatgagataaaacgcaaggccttcgccgccgccttcgagcgtgacgcttcggacgcagagaacggccatgatgacgaagaggcaggccatcatggctttggttatacgctcaacgcccttctggaggccaaggctgcacacgaagaatccgatgatggtgacaacgagtagccagccgatcagcccgatggggtcggcgagcatgttcgagaacacgccgcccacctgctcgcttgaaagcccgttgaattcgccggacgccatcttcaccacgtaggcgagcatccagccgccgacggtggtgtagaacatcatgagcaggtagcagccgccgaatccaagccacttgtaccagtgccatttcgtccctgcgggttcgagcgtatcgaagcttttcgcgcagcttttctggctggcacggccgacggcgaattccatgatcatgacgggaaggccgagtatgatgagaaatacgaggtacagcaggacgaaagccgcgccgccgtactctccggtgatgtaggggaatcgccaaacattgccgagcccaattgcgcagccagcgctgatgagcagaaatccgagcctgcttccgaatcgttcgcgttgttccatcacgttctcccgtgtcgcgtagcccgatgggcgatgtccctgattgcggcgcttttcgctccggttgggcggaagcagaaaagcacccagccactttaccgtatttctccatacgagaaaatggggcatgcggtaaccgtgccgggggataaggtttttgtgcacgaaaacggatgcacgaaaaagggcacgcgcacgcgcgtgcccttgaaaggcaaatcagaggttattctaggccttcatcaagcaggctgcgttccagcatccgattcgtcggcgtcttcgaacttctcgtcggtgcgtgcgcgcagtttcttgaccgagcggccgagcattcctcccagtttgggaaggtttttcgggccgaagatgagcagtgcgactaccagaatcaaaacgagttcgggaatgcccaatccgaatattttcatggcagctcctttcgctaacggcatgcggcggttccatgcagccgtcgctcaccgagtcattaaagcacagaaaaattatagtgacaatatttttatagagactataaaaatatacgacaagtatggaagtgcgggggaagccttccgtataatgcatgcaagcggttgggaagctggcggaagaaggcgcacgtgggatcgaaaggtgtcgaatgcaagaggggctgagggaacgcaagcgcaggcagacgcgcgaatcgatcgagcgggcggcgatcacgctggtgcgcgaattcggctatggcggggtgaccgtcgatgccatatgcgatcgggcggagatatcgcagggaacgttcttcaattatttcccaaccaaggatgccgctatcgtcggcatcgggaagttcgatttggaagaccaagcggttttcgcggctctcgaccgttacatgccggctacctttttccacgcggtgctaagtctttttctcgatgtcgtgcgaagctacgattgggatggggatatcgctcgaatgcgcgtggagctcgtaaaggaaacgccagatctcatgaagctgtttctcaacaacagcttcgaatacgttgaggcgtttcgggaaagggccgcggcataccttgcgctgcacggggaactgcggacgtgcgccgaggttctcgatgcagctgacgaggcgagccttgtcgtatcccatgcgctcgaggcggccaagttcgcgctctaccaagcaacaaaggatcctcaggcgaagctgcccgccgctgaagacgtcgaagcgatcctgcgcgcggctctcggctgagatgcaagcgcgcccaggaggtgtcgatgatcgacacgggctggttttctgtccaaattaggtaaaaagttatgaattttatagaacaacctatataactgtattgcaaaacatgttacgtttccgtagactgttaaatgccatagaatcggtagcaaactagttcgggcgttttgacaatctgatatcgcatgcaactcgaaaggcgcctccgggcgtctttcgtcgttttctggcaaagatgacctgctggcatatacgaggcgaatgacttgcttcgttcgctgccggtgtttgcgctgggtgagggcgatatcggcgcacacgacaggaggtaacatggaagcattgaaaggagcgcgtactccgctggcagtgctgcttgcggtgacgcttgctctcgggggatcgttctcaacggtcccgctcgcctatgctgatcctgaacccgcagtgacgggcgacgccgcttcgccgcaggacgaaagcggcgatagcggctcggcagagggatcatccgaaggggcgggcgctgaaggcgacggctctcagggtggaaacgctgccgagggaagcgaagacaacggcctgcaagcagggcaagatgagggagtcctcggcgataacgtcgatgggctgaacgatgacgaggcgatcgcggcgcagggcctatccaatgaagccgatgaagccgagttgcttgcggtaagcccgacgggcgatgtggtcgtcagcgatatcgatgagcttatcgacgcagttgccaacgcgggagagtcgcgcacggtttcgctgagcgacgcgttcgttgcggatatggctggcaagaacgcaacgattgcgcttaacaaccagcaaggccacgacatcgtcatcgacggcggcggcaaaacgctcacaagcgccggaggcaaccgcttcttcagcgtgaccaatcccgccaccggcagcgtcgcattccagaatgtgtcattatcgggtgcgggcgcgggtgttatagcgaacgccgttacgggcggcaagatcgtgctcgacaacgtgcacattaccggccatgcggccaacggttcttccggtcaagcggtcggtctttccaacggcgagcttgaggtcaagaacagctccatcacaaacggggcaagcgcgattgcgggcacgacgggcaacgtgaagacgatcaccgtcaccgacacggtgctgaacggcaacacgggcggttacggcgcagcggtgtatcccggcgccaatacgactgccacggtgaccaggtgcacgatcaacaacaatacgggaacctcaggcgggtattgtggcggcgcgatttcgatcgaccaggacagcaacgtgcttctgacggtttcgcagtgctatttcgagggcaacgaggctcctcccgctacgggatcaggcggttcgggcggtgctatcgcgctgtatcacagcgacaagagcaagcttatcgtgaaggattcgtatttcgtgggcaataaggcaaccgcgaaccagaccgttcgaaacgacggcggtgcgatttcggtgttcatgaacggtgccgagcgttccgctgaagcggtaatcgagaactgcgtgttcgagaacaacgttgccaacgacgatgcgggcgcgctgctcatcgagggcgtttcgagcggaaccgcgtcgatcaatgtggaggtttcggttagcaattcgacgttcatcggaaacgaaggcaagcagggttcgacgggcgttgccggcggtgccgtgcaggtgttcagcaaagctcgggcatcgttcgataactgcacgttctacaagaacattgcgggcaacggcgctggcggcgccatcggcttgagcggaagtttggcgggcgggtggcttcccgttcgccctactgtggcggtcgagaactgcgcgttcgtcgagaatacggctgcgaagggcaccaacgtgagcaacgtcgccggctggggcggatcgggggcaagcggcttcaccaacaagggcggcaacatcggctacgatgccggtaccgctttgccggcgggcttttcggcgcagacggtgtttggaacggcggctgcaacgctgcaggtcaacggatgttccacgcaggtgggcgccgatcccgacgtgcatttgccaagcctttaccttgcgcctgcggttgatgatgaggccggtctgtacgccgacggcgccgcaacggcgaatgccacggcgcaggatgcccgctacgttgcccgcaacgcttccgctcccgatgcgggcgcggttgatatcggctggatcaagctccatccgaacggcggaacgtgggacgattccgtgatcggtgattacaacaacacgcgcatgctgtcccataccgatgtgtcgggcgacgtctacgcctacgttgcgtgcgacacgggcaacgacatcgcgcttcccgggggagccatgttctcggcgactccgacggacaaggtgcttctcggatggggcgagtcggcgacgacgcagcctggcgatgccgacttccatgcgatcgacgaagacgtgctcggatgcgaaggtgccgtatgcggcgtgtactatgcggtatggggagaggacgagcctcctttgcctcccgatccgacgagcttgaacgttgcgcgtctgttcggcgtcgaccgctacggaacctctcatcaggtatccacctacgagcgcgctgtggccgatgaggatatcgtcattctcgcatcgggcaacgacaaccatttccccgatgctttgactgcctcgtctttgtccgggcatttgggcaacgcccccatcgtgcttaccgattacgcgagtctgaccgaggatgctcggcaggcgatcgtcgatgacctcgatgcgaagcacgtgatcatcatcggcgacaaatacgctgtttcggaaaacgtggaagcggagctcaatgctattccgagcatcgatgtcgtcgagcgcatcggaggcgttgaccgccaggagaccgccgagttcatctacgaagaactcggcgcggccgcatcgaaaacggcgattatcgcccgatgcgacgatttcccggattcgctgaccatctccccgtgggcggcggtaaccaagagcaccgtgttcctctcggagttcggtttgaccgatctgacgcctgagacgaaagcggcgcttgcatcgggaggcttcgagcgcattctcgttctgggcgacgagttcgccacgccccgatcggtatacgagcaggcgcgcgacgccgcgggcctcaccgatagcgaggtgatcaggatcggcggcgacgatcgttacgagaccgccggcatgatcgccgattgggcgacttcgtccgaccgcgatcccagcgagcagctgaactgggagaggcccgcgatcgcacgcggcgacctccatcctgattcgctgaccggcggtgccttgcaaggacgcgaccgttccgtcatcctgctcaccccgcccaccgaggtgggagccgaagcgcatcctcgtatttctgctcaggatggcacggtgaccgagatccgcttcttcggcgatgaatacgcggttgccctcgatgtgacgaaggcgttcatcaacgcgcttacctacgatacgatcgtttggaagccgtcggatgccatcgcaatcgatatgagttagagccgagcgatcggcagcggcttcgcaaaggcgcgaggcttggaagaaggcgggcgctctcgaaacggggcgcccgccttttgccgcgcgggcttcccggagtgcccgtcaccgcgtctgccgctacaggtacatgaccatcatggcaagcaggggaatggtgagcatcgacatgacggtcgaaacgaacgtgcccttggtcatcgtcttcagatcgcctccgtactgaaggcaaagcagcgttccgttcgtggcgacgggcatgcctgaagttatgacgatggttccgagcagcaggggatcggcgatgaacgaacggaatatgaagaagatggcgatcggtacaacgacaaggcgaaatatcgaggcgatgtaggggcgcgcgctcgagaccatctcgcgaatgggcatcttcgcaagcgcggatccgatgatgagaagcgctgccggagtcgtcatctggccgatggtgtcgagcgactgcccgatgatgcccgtttcggttatgcgcaagagcgcaagcgccatggcgatgaaacaggagatcagcgtggggctcagcacgtgtttggctccatcgagcaatcgctcgcggatggttccctcccgttcggaaatcatgaacacgccaacggtgaagacgagcaggttgaacgggatgttgaagattgccgcatagaggatcgcctggtcgccgaagatcgcggagagcacgggaaatccgatgaagcccacgttgccgaaggcgatcatgaaactgtaggtgccgcgcctgtctttggggaagcgcagcaaaaacggcaccgcgaaggcaatcagaaggatgatcgcatagcttgcacacgaaaggagaaagatcaggcccacggtcgatgcatcgggtagctgttcgttcatgagcaccgacgaaacgatgaggcagggaagcgtcacgttgaggagcagcttcgaaaactgtccgtcgaactgatcgttcatcaccttcgctttgcgagcgacgaatccgagcacgatgcccagaaaaagaatgaccatttgcgattcaaccgattcgaagctcacgggagcaccttcctatgcgggcattgcgccgcaatgtttcacgtgaaacatttgttcgtcttattgtttcgttcgtcagctatagtaccgctttgcaggcgatggctggggaaaagcaatcgagcggttgaaaacatcgcagaaggcagattgtgcgcgcgatgcgtgcagaccgtgcgaagcgtgggccggcagtctggggcctgctgcatgtcatggtagactttctgcgaacgatgacgaaacagaaggatcgactgcgatgagagattacgattcggttgagagcctgcttgcagccgaagaatgcaccagtttgcacatcgagtgcagcacagcggtttccgaacagatccgcgaagcggtgcgcgtgcgctatgggagccgccgctgcgcgttcatgctgtgcgacgatcaggggttcgagcgcgaaaccgttcgctcgtatctggttttgttcgcccgcatcgccggtcaggggcatagtgcggtcgagaaggccgttgcccacttcggccttgccgatatggtggaaaggaagctgaaaggctgcacgaaggccgagcggactctcgtcgatctggcccgcgtgagtttggccgagcccgaagtttgcttctgcgagcgcccgctgttcgatctcggcgccgaagcccgaagagccgtgctcacctggatggcggagcgcgtcgagcacgggacgattttcataacgacggccgaacctctgcgggaggccatgctgatgcctggcatcgctttttggtacgaagacgggtggttcatggcggccgaggtaagcgaagaggacagcgaacccgaggtcggcgatgtgtttcttggcgatgaggttcgcgtgtgcaagattcctgcgaaaacggaaggcgcaacgctcttgcttgatcccaaagacatcgatttcgttgagagcatgaacaaggcgaattacgtttcggtgcgcggaaacctttatcagacggcgcttaccatggacgatctcgagggcgagctcgtgcggttcggcttcttccggtgtcaccgttcctacatcgtcaacgtgcagaaggtcgcaaaagtcgaacgctacacgcgcaacagcttcaacctgaccctcaacgatgtggcggagtcgagcattccgcttgcgaagggccgcgccgacgagctgcgcaagcaatttggctggtagcgcagaagtgcagaaaaccgtttcgaagcgaactgcgccccggtctgaaaaccaaggcgcagttcaaagcgaaagcggatcccgttttgtcgctattcgctcggaagcgaaagctcgatgcactcgaagtgtctattgtcggagtcatcgacgaatgtgaggaagaacaggctcggatcgtcgaggatttcgttcggcacgatggcgacccagcgcacatgcgaggattctccaggtgcgagaacgagatcggaatactcgttcgacttggcgctatcccaacccccgttaaggagcgcgaacgaacgggcaagcgcggtcgacacggctccttcgtcatcgacgatcgcatactccccgaaaaatcctccatcggcggtgagctcgctggttctcttcccgacattggcaatatcggcttccatgaccacccaggaaaagtcgccttggatcgtgccgtcatcgtctagggtgtacccgtcgatttggctcacgacgcgattgtagtacacccagcttcccatgccgctgcgcaggctttcgagcgcaattccgtcgggcatatccgtgctccgttcgagcatggcgagattcgaaatcgaaaacagcgaatcttgttcaaaggtgaatcgagcgccctcttctgccgaatgcagggtctcttcgctaacgacgggtgcggaagttccgtttccaacatccagaggccgcacgacgtcttgccgctcgaacgtcatcggctcgcttgctgcatcctcgaactcgtttgcgttgtcgagcgaataggggaacgcttcgtgggtcgtttgctttacgacgccgtagagcgtgtggatgtaatcggcgtacttttcaagtccgtctgcttcggggtctacgatttccggtgtcagctcgatttcgtagacgccgctgtcgccttgcgtcatcgctgccttgacatcggcggcgtgcagctctatcacctgtgtggtggtgtggccgtcggcaaacgttgcggtgatggtaagggtagcgccgtcgaaaagatcgatgaccgcgtcgggtgcatccatgtcgctttcgacttccccgtaatcctcgttggtccagaatccgaagctgcatgcaggcgaatcttcatcgacggcgacgtcgatggtcgagccgagcttcttggtgagggaaacgacccattgcttgttcggatcgcttttttccaggccgtcgttcgatccgaccacctgcacatcgtcgtaggcgccgtaatgttcgccgaggccgcgcgccgtcggcttccacgacatgagctcgttcaatttgtcggggtcgtcgccggcggagaccgtttcgttcgtgcggctgtagagagcgccggtggaaaccgttgcctggatgcgggcaagcccttctccttcgacgcggaacaggcaaccggtgtagtatccctccgtggaaaggtaggctgccttgtcgctaatgccgtaggtgtcgacggtgcggctgaatatgatctggttttcggttcccatctcgaggatggaatcgctgtcggctgcatatgcctgtactgcgaagtcgggcgtagcttccccgaagccgaagaggccgccgtttccgttgagcgttacaagcccgacggccagagcgattacggcaaggcatgctgctatcggaagcatgattcgactgcgggggcggcgttgccccgagggtgctgcagaagctgtcacgcttggtcttttcgcctggccgcccgatacgacggcttcatgcgaagatgcgcttcgcccgtcttttgcgtgcggccgtcgagccgcattgacgatcgtgcgcttccgttcttttgtgagctcgatttctttttgggaatccgtgtaagctgcccaaaactcgttttcattcatcggtttctcccatcttgagtttgagcgaagcccgcgcgcggtgaaggtgcgagcgcaccgttgcgggattctggtcggtgatctgcgctatttcgttagtcgaatagccttcgaaataatgcaggtggacggcaacgcgctgtttttcgggaagggcggcaaccatcgcttggacggcgttttcgcccgacaccttgtccgcatcgcaaaacggcacgtcgttgcgctcgatcgcggcgctttcgaaggcttggagcgtttcgccgcttgttgcgcggcgtcttttccacgggcttcgatgcacgtcggcgcaacaggtgagcgtgacgcgcagaagccatgctttcagatgctcgtcgtctttgatcggtttagtgctttggcatagcttcatgaacacggtttgcgtgacgtcttcggcatctgcgaggttgccaacccgacagagggcgagccgcagcacggtatcgccccactcctcgacggcttgctcgatgtcgatgcagcatgcctgcacgtaggtcctttcgctcggcttcatgcgggagctatggcgttcaagcttggttgtggtcggtgcccacatgcaagtgcgggcaacattcgtttcatccatagtaggagctcctttcatccataatacggagacggaggcgatcttgttgcacgattctgcgaaaaacttgggcacttacaggcgggtgcagaagatgttcgagcgagtctcccatgcaatcgcccgcgatgcggaccctgtaatgctgtaaaatgcggcatcgtggtggttcgcgaaaggggggctctcggtatgagcattgtgaactcgcgtttaagtgcgctttcatctgataaagagaagtcatcgtatcttgcaaaaatcagagcaaacaaggacgaactggtcaggatgggagagagcctgttcaaaacgccgagtgttgagccggaggttgcggcttcgtgggtcgcgtcgcgcaatgccggcgtcgatccgtatgcttcaacgaattccgagggaatcgattacgaggagctgtcgaagcgactggctgaaaacgccgacaccattgcggtagtggatgaggtcatagagtcttttcgcggtgttttgaggaaagtggttacgtcggtgttctatgccgatagcgaaggcgtggttctctatttgttcgaaggcgatgtctcaaacgataactaccggcaattcggtacgcgtgtcggtggtttgtggcgagaagacgttacgggcacttccgccgtctctctgtgcgttaagcaccaagatatcgttcaactggtagggcctgagcattaccgtgtcgtcatgcaagatcatctgaccacggctgtgcctatccacgatggcaaggggatgtttatcggcgtattggcgatgaccacattgcataacaaagtcggtacgggcctttcctatgctcagccctatatgctcggattgtccatggcgctggcctcttccatcgagggggcgatacggcttaaagccgaaccgtcggatacggcaaccgagaaggaaaatggaaaataccctttcggcgagcttcgcgagagcgtttggagtctgcccagattcgacgattttgtgggttcgagcgcttctctctcgaatgcgaagaagcttgcgaaacaagcggctgctacaggtatgaacgttctgatcagcggtgaaatgggtgtagggaagctcatgttagccaaagttatcgcagcggagcgaggggtaagccctgaatctctcatgatgctgtcgttttcgggcattcccgaatccatccttgaggaggaggttttcggcaaggagagcttgggtggaggtgctgaaaaagtcggtattctcgagcaggcgaaagacggtgtgctcattattctcgatgtaggcgatatccccgcaaaaatccagcatgcgcttctgaacgcgatagaagagcggtcgttttgcagggttgggggatcggttcgcgtgccgctaggatcacctcagatcgtttcgacatctgagatcgatctgatagaacttgtcagatccggcaagttgagaagcgacttggccatcacgctttcatcggtttcgatcgcgattcctccgttgcgcgaaaggcgcgacgacgagcgcatgctcatcggctacctgataaagcgggagagcgaacggcttggagttgccccgccccgcctcacttcccgcgccatgcaggttttgcttgcggctcagcttccgggcaacgtgcgccaattgagaaacatcctgcagtacgcaatcgtcgtttcggagaagcggacgatcgaagcggaggattttccgcttagcatagaagagggcgcgtccggcgggcttgcagatactgatgagagtcgggttctgactttgaaagaagccgaacaaaaggcgatagagcatgccctcgaattcacgaacggaaatattcgtgaagcgggacgggttttgggaataagcaggtccactctttacagaaaaatggaagagtaccgaattgtctgcaaataagtgtgcatttgatgaaagagatatgtaattcagtttcaatatcaatcgactgcttttcctaggtttctcacaatcgaacatgtatcaaaatgggacatattgataacgtcgaaacgtgtctcaatatgaagcacggttttgttttccttcgctaataaccaatcaaatatagaacagatgtttcatattccgatctctctataatcaaaatccgctattgggtagctgatccgaatggggcacatcccatcgggtttaaagcgaaccataggataaggagagaggagaatctgcatgagcgagcccatcaagatcaaggacaaaacggtcctcaagggtcttggcttcgacagcttcggccagggatcgaattcctgcgaagttgacgttctcgatggaaagatcgtacgtacgcgcccgttccattacaactacaagaatgcctacgatccaatggataagaatccctggaaaatcgaggctcgcggccacacgttggtcgcgaaggaggaatcactcctgtgcccgttcgagctggcgtacaagctgcgcgcttattcgcccaaccgcatccctttcccactgaagcgcgtcgactgggagcccggaggagatcccgagaagatccatgccgagactcgcggcatatcgaagttcgtgcgcatcagctgggatgaagctacgaccatcatcgccgatgagatcaggcgcatggaatcgcagtacggactgaccgctattctcgcgcagtgcgacggccacggcgagacgaagagcatccacggcccgcacggctgccagacgcacctgctgcagctgctgggcaactacacccagcagatccgcactcccgacagctgggaaggatgggtttggggcgcgaagcatgtttgggcgcaattccccgttgggcagcagcgtcaggtgaatatgctcaaggacatttgcgaacattctgaaatgatgctgtattggggttccgaccccgaggccatgtgctggggatggggaggtcagacggcgagccacatcgcttaccattttgacaaactcggcatcaaaaacgtattcgtatcgcctgatttcaactatactgcggccgcgcatccgggcaagtggattcccgttctccccaacacagattctgctcttcagtgcgctatagcctacacctggattaccgagggtctttacgatcgcgagtacatcgacacgcactcgattggcttcgagtggtttgagtcctatgtcatgggcggcattgacgatgtggtcaaaactccaaaatgggcagaggagatctgcggtgtgcctgcgcgtatcatcaaggcgttcgctcgcgactgggccgcgcatgtgacggttatctcgcactgcaacggcggcggctacattcggtctgcgtattcgcacgagcctgctcgtctcgaggttgttcttttggccatgcagggcctcggcaagcccggttccggtcagtttatctacttccagtggcagctatttggcatgcagtcgacaaacgcgggcccgcggtcttcgatcatcccaagcattgaaggctgctaccatggcatcgaccaggcgtttattcctgagtccttcattccgaaaacccttattccgaaggcgatcctaggtgattggtctgaagagaatccgctgaaatggcacagcttcacgcattgctcgcttcctgcgtccgatcagttcgacgagtaccagtatcccgtgccgggcgcttctcccatccatatgatctggaccgacacgccctgctggaccacatgctggaacggcggcaacgaaatgatcgaagccgcccgatcgcccaagatcgaattcattttggctcagcatccttggttcgagaatgattgtctgttcgccgacatccttctgcccgtcaacaccaaattcgaggaagaggactttgccgacgacctgctgaacggtttttacaatcatattttctatgaggctccggccatcgagccgatcggtgagtcgaagagcgactgggaatgcgtactcgaggttgccaagaagctcggcgtttacgacgaactgtccgaaggccttacttacgaagatcttatctatcgcggctgggagaaatcgcgctgcgccgataacgtaagctatgaggatttccgcaagaacgagtactacgtcattccaactgctgaggattgggaagaggatgagcccggtctgcacgctttttggcgagacccgcaaaacaacccgcttgataccccgtcgggcctgcttgagatttactccccatcgttggcgtacaacttccccgatgacgaagaacgccttccttatccgcgatacatgggtgacggcgagtctcatcaggaaagccgattctctccacgggcgaaggattatccgtacgtcatgatgtccaatcatccgcgttggcgtgtgcatgcgaatatggacgacgttccgtggttccaggagatcgagaccagcaaggtccatggcgatgacggctatccctacgaacctgtgtggatcaactctgctgacgctgccgaactgggcattgaagacggcgatatcgttgaaatccacaatgagcgcggcatggtgctcggtggcgcatacgttaccgagcgaatcatgaagggcgcagtcaaccaggatcatggcgctcgcctcgatccgttggagtttggcgttgccgatcgcggcggtgcgaacaacatcatctgcccgacgaacgtgacctccaagcactgcgccggcgaagtcaccaatggctttttggttggcctgaagaaggcaaacatggatgagcttcgcgctcgctatcccgaagccttcgagcgcaagttcgacgctgcaacgggcatggtcatcagcgattgggttatcgaaggagatgaaaagtgatgaaggtattcgtcatcgacgagcagaaatgcaatggctgccataactgccagatcgcttgtaaagacgagcactgcggcaacgattggagccccatttcgcttccgcagccgctcacgggtcagttttgggtgaaagttgacgagaagacggtcggccaaactccgaaagtacgtgttgactaccacgtgacgcgatgcaatcactgcgagaacgctccgtgcatggcggtcgccgagaacggagcggtatatcgccgagaagacggccttgtgatcatcgatccggttgccgcgaagggccagaaggccattgcggacgcatgtccttacggcgtagtgttctggaacgaggagctcgaagttgcacagaagtgcacgggttgcgcacatcttctcgatgcaggcgaaaaaccccattgcgtcgacgtgtgcacgacaggagccctgcgcttcggagaattcgaggagtttgccgaagagctcaaggggggaaatgtcgaggtcatgaaacccgagctggggaccaagccgcacgtgtactacctcaaccgccccaaacttttctatgcgggcgatgtttacgaccccgagttggacgaatgtttggaaaacgccaaagtcacgctggtgcgcgaaagcgatggagcggctttcgaacaagaaaccgatatctacggcgacttctggtttgacggtcaggaggctggcgatcacgagctgcggattgaatgcaagggctacgaaaccatcgtcaagaagttcgactccgaagagtgcttgaacctcggcagtttcccgatgagcaaggcttaagcctgcaaacaatgcgatcccaatccaggatgcccgcctctaaaccgggcatcctggttagcgaaaaccgaagcaacgaaagaaagagagtttgaatatgtgttttagaccggcaatggcgtcagccgaaatcaaatgccctcggtgcgggcatcccattgaagcgaaggacggtgaagtttgcccgaaatgcggccttaccaaagaggatgttgagggtggcaaccttgttccgaaaccaggtgggcttgttcctccgccgcccgcgccgccgaaggctcggtaggctcgggaggatcacatgccttcggcagatcccggcaaagtagcggtgttcgtatgttcgggcgatgatctcgccgagtgcgaagtcgacggagggattacggtggccaaggcactcgagtctcttggctattctgcgaaaactccttgcggaggtatgggccattgctgttcgtgcaccacgaaagtatggcgcagcggggaatcttcacctacgagggtccgtgcttgtcgagaaatagtgcaagggggaatgcgcatttacccggttcaagccgggaagatctccattccggtaccgcctttgcctagagggcttcctcggtcgcggggttagtggatgccaccgcttggatcttggcggatgcaatcctgctttacgtgccatgggttggcattgccatgcgggcaaggcggtagggagcaggggaatgctccctcgcgcagtgcgttgcccgcatgtcatgaaatacagtcaaagaaggaagggttttgaaatgtcctcaaatgaaacaacagcttcgcctagcaagtggcgctggctcgttctcgtgacgtgcttcctgctctacctgttcggcaattactcctcattcgccatgggccttacgatggttcccgtccgtgaggttatgggcatcgacgctgcggctggcggcatgctttcgtccattcttatgttcggcgcagtaatcggttgcgtgcttgcgggtcgccttgcctctacgtggggcagccgcaacgtaatcatcgcttccggcgtggttatcggcctttgctgcatagcctgctcgcaggttgccgactacaacgcatggctcgtcatcagattcattaacggcctggcatacggtgcgcagctcggtcccgtagttacgattgctgccgaccattgggcgggaaagcatcagaacaccgctacggcattcattctctcgagcttcccgatcgcaggccttgctgcatcgttcgtcaccaagatgttcgcggccgactacacgatggtttggcttgtttgcggtctcgtcatcattcctgccctgctcgtgctttttgttccgagcgacaagcttagtgccgagcaggttgctgctcaggccgaaaagggcgaaagcgttggcttcgggtcgatctttgagggtaacctcaagttcgttaccatttttgccatcatcgtaagcttcatgaatatggcgggcgtttgggcgctcggcacctggttgccctcttggcttatgaacgagcgtggtctgaccactgagattatggctaacttctctatggttaactaccttggtggttttgtgggctacttcttctggtcttggctgggcaagaagataaccaaccccaagtctcttatcgtaggctactttgcgactgcggcagctatggttgtctacatcatcatgcctggaaccgatctgctattctactggggtcctgtcgtgtacttctgtcaggccgtcaatgttatgtgctccatcacattcgctgctgcattcccccgtcttatcagggcgtatggtgctggtacctgtttcaatgtcggtcgtgttggctctatcatctcgccttataccaccgccatcatcggtacggctctcgggcttactgccggtttggccaccgttccagtgttctacgcggtgggaggattgttcggcttcggcctcaaccgcttcgtgaagaagcaggagagcctcgattctcaggagagcttcgaagctgctgaaagcgtcgagaaataagcttgccgttttagtcggcggcagcgcgggagcgggcaatgggtaccgtagcgcgccgccgacatttgccggtatggatcgacaaatgtgcggacgggctcgatcccgtccgcactcccaaaataggaaatgggagggtagcatgaaaaacgatgcgttttacatcgcaaaggggtctcccggaacgaaagcacgttgggcggttgtcgcttgctgcgccgcggcgtacttcttcgattcctacgacatgtacattctgggaatcacgatgcagagcattctcggcgatctgaacatgacgacggctcaaggcggattgctctcgtcagcgacaatgctcggcgccgttatcggcagcgtgtttttggggcgcttcgcctccaatcgcggcaacaagctttgccttgtggcgtgcactgcctggatcggcatcggctcgcttgccgtcgtattcgtatccagcttcccggcgtggtttgccttgcgcgttttcacagggatgggcatcggtggcattatgggccccatccatgctcttatctggcagcattgggctcctggttaccgtgcaaaaatcacgggtgtaacgttttctacgtttccgattgcgggcatagttgcaagcctcatgggcaagctgatgctcgttgccgatttcaggtggatattcgttaccgcgggcttgtctcttgtcgttgcccttgtcgcccagttcgccattcccgatgaccggcatctggttcccgctttccaggcaaagacatccaagaacgtcgagaaggttaagctcaacgagattcttgtgggcaattacaagtggatcacgctgttcgccatttttgccagtttcagcaacatggctgcctgctgggcgatgaacacatggattccgtcttggctcatgaccgatcgcggttttgacgtaagtcagatgacgaacttctcgatgttgaactacttcggcggtttggcggggtatctcatttggggcgtcataggatcgaaggtcggttctggcaaggccatggttgccgcttacgcgctttcggcagtggcgcttttagcctatatagcgttgccaggcggcgactacctgctcatactcgggccgttgctgtacttcggccagggaggttgcggatgccttaattcgattcttttcgcagaggcgtatcctgaacgcacaagggcttacgggtccggcacgacgttcaacgtcggcagaatcggctctatcatctcgccctattcggttgcccttgtcggcgcaagcttcggcctgacggcgggtttgctcatggctccggcattcttcgcattcggcgttgttgtgtcgattggcttgaatggcgtgctgcgcaagcagagggctctcgaagccgctgaatccgaccgaccgtagtacgtgcgtttgttgtggttcgccgaaagtcgggccttgacccgactctcgagtgcattggagtacaggaaaggaagtatgtgatggaagcgtatgaggcaattttgggtcgcaggtctatcagggcctactccgacaaattggttccggctgatattgtgcgcaggatatgcaatgcggggctctacgccgcaagcggcaacggcatgcaatcgaccatcgtcgttgcggtaagcgacaagggtacgcgcgacaagatgtcggctttgaatgcggcggttctcggtcaggaaggcgaccccttctatggtgctcccgttgtattgacggtccttgcacgagccgaggcgggcacccatcttcaagatggcagccttaccatggcaacgcttatgcttgctgctcgggccgagggcctgggctcgtgctgggtgcatcgcgctaaggagcagttcgagggagaagaaggtcgggttctttatagagaactcggcatccctgagggctatgtgggaataggaaactgcattttgggatatcctgccgatggctttcccgaagcggatgcacgccatgagggccgagtgatcgagatcgcgtaaagcgttcagggagggcttcgtgaagtacgagtatgttctgttcgatttggatgggaccctcaccgatcccgaggagggcataacggagtccatccggtatgccctctccttctttggaatcgaggagaacgatcgcgccaagttgcgttcctttatcggacctcccctaaaaacctcctttcaggagttttacagcatgagtgaagattgggccgagcttgccattgcaaggtatcgcgaacgcttcgccgacaggggtctctacgagaacgcggtttaccccggggtggaaaatctgtttgcctcgctcggagaaacaggagcctgcgtggcgctggctacctcgaagcctacggtgtatgcgctgcgcattctcgagcatttcggcctcgacggatacttcgactttgccctcggaagcgagctggatggcacgcgtaccgcaaaagccgacgttgttgccgaggttatcgagtatttcgcagagaccgatctaacgaagtacgtcatggtgggcgatcggagccacgatatggttggcgcacgatcgaacggaatcgattccatcggcgtgctttacggctatggttcgcgcgacgagcttgtcgaaaatggagcgatgcatatcgtcgagtcggtcgacgagcttacgcgttttctatgcgagtagcgcgctgcaacgactctcgccatcatacggagtgcgttcatcctccaaacgccgtgctcctcccgtcgccctctgggctcctttcgtcatgattccatctcccgtcaggccatacgtattgttgcgcgccgcgtgccgtgggaaagttgcggcaagccaaaaacggcggccgatcggcggcccgatgaaaaggagatcagaatgacacctatgctgacacggttgctctcgatggaccgcgtgtatctttcgtttaaagagaagcgcgtgctcgacaacctcacattcgaggtgcgccgtggagaaaccttcggtttcctcggtccttcgggagcggggaaaacaaccaccatcaagctgcttacgcgccaattggtgaaggattcgggaacggtcgagctgttcagccgtcccatcgaaaacgcgcacgatgccgattacgagcgcatcggcatcctttccgacacgagcagtctttacgagcgcatgtccatagaagacaacctccgtttttatgcgaagatccgaggcgtttccgatgccggcatcggcgagctgcttgagcgcgtgggccttgccaacgatcgcaagacgcttatcaagaagtgctcgaaggggatgcgccaaagagcgactctgcttgccgcgctcattcacaatcccgaactcctgtttctcgacgagccgacgagcggtcttgatccggcaacgcgcctcgaagtgcaccgaatgctcaaagacatgcacgatagggggactaccatctttcttacgacgcacgatatgaccgaagcggaagaactttgcgatcgggtgggcatcctcgataacggatcgcttgtggcgtgcgacgagcctggcgctctgaagctgcgtttcgcggaaaacaaggtacgtatcgtcatgaatgacaatgttgcattggagaccaccaaagatgccgctggagccgttatcattgcacaggcgctcgaaagcggcggggtcgtatcgatccactccgaagaaccgagcttgaacgatgtctttcttcgccttaccggaaaggaattcgaataatgaacgctgcacttcgtaaaatcggcgccttgtcggtcaaggatgccaaggacattttcagaaaccccgccattgcggtttgcgctctcatgccgatcggcttcatgctgctgtaccgcttcgtcatgttctcggatatgagcccggaggccgaaccggctgtcgatgcctttctgctcggcacggctccgtgtttcgccgtgggcatgatctgctcgatgaccatcctctacgcgctttccgaagagaaagagaagcatacgcttcgcacgcttatgcttgccaacgtgagcggcgggcaggttatggccgccaaggtgatcgtttcgctggtggtgatagcgattgtcgacatcgtgtgtttcgttgtcatcggagccgatttcttcatgcttgctccgtttattgtgctcacgctgcttggttccgtgtcgacggtgctgctttcgcttgttctcgggctcgtgtcgcgcgatgtcatgagttcgggtgtgttcgcgctccccatcatcgtgctcgcgctgctgccgatgttcagcatgttcggcgacggcttcaagatggtggcgagctattctccgtgtggcggcatgtacgaccttctggggctgctctacgaaggccggctgttcacttccgatgcgatcatgccgcttgtcgttacgttcgcgtggattgtcgtgtgcgccttgctgttcgcggtcgtgttcaagcggatgggaagggacaattaaaccatgctcgaaactccttgagcaccggcgctcctccccgaactttgtgcttctttccgtcgacagcggtggcgcggcattcgtcgccgctgtcggtggttttggaagtgctcacggctgtcaggtagtcgcggcgaaaggcaatgatgttgcagttgctcacggcgatgaaccagcgctggtctgcaaacgacgagccgcgggcgccgccgattgggcaacgaccagcacgatgacgatgacgatgagcacgcccgatattcccgctgcgattcctatgaaaacggaaatcgccgaacggtagagcgtccctatggtggtcggacgccgttcgcgcgcagtaacgggaatgccttctttctcacagcgggagtagaagttgttcaggtgggtgacatcgccgctcaggctggcaaagcgcttcttgtttgcgtatacggaaacaagcatgttctggttcgattttgcaacccgggtgatttcgctgaacgtcgcttgccgcgtgcggccgaagatggagcgatatcgaagcacatcgccatcgacttcgagtcgctgcatgacagcgatgaaccagatgatcagcgagatgagggcgagagcgtgcccgagccacagaaggctcgtatcccaatcgccgaacgatatgccgttgtacgcgtacgaaaatatcatgagcgcctcgaaggcaagcgctgcaccgaggaacacgcgagcgtaggtgcgcggcgttttgagggtgaaccgattgaggcttttcgacgtgctttcgttttgcgctcccgatttgagccagccgagaacggggccgaccacaaatacgagaacgagcgcctgagcggctgcggaaacgaagctttcttgcatggtgcgaacctttcgttcgggcgtcgggcgatgtttgatgcgaacccgctgagcgattgtgcatagcgagtacgtgcgagccgttgtcgagaatatcggaattgagaaaaaagggaagaaggaaccagtttttggttccccagcgagatggccctatgttttaaacggggcggtgctaaatggcaaacgatgggaaaaccgcttttcaggcgattatgcgaaagcccgtttctccgataggctttgggaaaaaacgcggcgatgcgcttgctgtgatccgctgccgcttgaaaggatgagatgccgagtacgattttctgtttcggggctgatttgcgcgaaaatcgagactgccgctttcgaggagcgcaacgcctctctaaccgctcatggcttttgacaaatcgataagttcttgcttcgagttcacattcgtcttgcggtatatatgccgcacatgcgtgtcgaccgtgcttctggataggtacaaggcatctctgatgtacgggttgctgcggccttcgagcaggaaaacaaggatctcatgctcgcgtttggttagtgcgtatcgttcggccatcattctcgcgcggtcaactatttcgatagcgcagctctcccttgatgatctggcttcgtcggctctttcggggttccctgaaagaaatgcgcttgcaaacacaagcgcaacgagcaatgctggtacgacgatggtcttttcgtcaatgaagaggggctctgcggcaaggaatgccagctcgcctattacggcgccgaggctaatcgccgcgaatccccaccccattatctcaggcgaagggaggttcgcttgttgatcggctcttatggcttgcattctcatcgtggtttcgaggaatgcgtgcgcacatgcgaacgcaaggcaagcgagcggagcgagaaaaggcgcgtcaagcagttcgcatagcaaacctgctgctatgatggggaaggcccatcttgtcgatagcgaaagatcgatactgggagaatattgggtgaacagctgaataaggagtgcggatagaatgaatccgaatgcgaagaggatctcctttgttgacggttcgatacccagagtgcccgcaaacatttgccatgtaaaactgaccaaagcgaaagccagaaccgtctttgccaagcccactgcgaaatgcttcggataacttgtttgagacacgggagttcgcgttttcgaaacagctcttttgtcaggcaaggcggttcgcagatagcatagaagcgatactatcgggaacgtgacgattgcgatataagaatagctgtccagaagcccgatggcgagcgctattatcgttccggtcaagagcagcacagaaagaagggtcttctcgacatcgccttcttcaagggtggtgagcaaagctccccatgcgaaaattgcgcatgcatttccggacccgagtagaaaactgccgaaaaagatatgccatacaccgttttgcagaggcaaggcaacgatagccgccatgccagcatattgaagaacgcacgcgcaaacctgcagtcttcggtcaagcctgccgatcccgaaggctcttgcaagaacgggcaaggcgactgcggcaaagattccggaataagcgatgacgagagccggaggccgtgacccttgtatcgctccgcctagaaccgaggtcgcttctgtcgtaggaaatgagcagaataccagggcgaagtaaaaggccattccgcagattgcgtaccgatggagccaagcagttttcataccatcctcccgctggctattttatcaggtttgcgttttgctgggtcgttcgaactggtccgcacggtgcaaatcacgtgtttctatcgatgggaatggggagttcttgtcgatgtgggtgaaatgcgaagctcctagcatttctcatgtgagccggagctgtcgacgcgggcgtctcttttaaggcatgcgttgaaaaaccggctctgatgtaatcgctatcgaatggagggatgggcaaatgaacgaattagacaaaaggcagggtgatgagagcgtccaggagaaaacgggattatcgcgacgctcctttattgctgccgcgggttttaccaccatgggcttcatggcggcaagccttgctggctgttctccaaaggaaaacattcaggacgttcaggctggtgcaaatgatgcggcagccgcacaagaagacgagcatgtgacgtacgatccagcagaagtcgtcgatgccgatgtggttgttgtgggggctggtccggcaggaatcggagcggtgatggaggctctggacagaggcgccaaggttgttctgatcgagaaaaccgcccaattgggaggcatggcatatggaaccgaaggcgtgttcgggtatggaagcaagatgcagacggatgcgcaagtcgaattgccgacagtcctcgacgtaattgaagaggagcttacctatacgaactatcgagtcgacgcaaatctttggagggacttcgtgtctcagagcggcgagaccatcgattggctgatggagcatggaattgaattcgaccgtgttgatacctatcaaggggcaagcttcttcgagagctttcattggtggccgggaggaagcggcagcagctttgctcccattgttaccgaatacttggatggtcgcgagggacttacggttttcctggagacgacaggcaaggatcttgtcgtcgaaaacggtgaggtgatcggcgtgtacgcagagaaagatgatggcactatcgtgcaggtaaatggcaaaggcgtcatcgtggcgacggggggtttctctcaagataaagaactgatgaccgagctttcgggaatcgattggagcacttcgggaggtttcgttactccagcgacgggtgatggctaccgtatgatgaaaaaagcgggtgcagcaacaggcacggtgtgcttcatcaacacgatgtgcgttcagacgccgacgggcgcccaggacatggtgccgatcaacatcgccaccaattaccaatgcctccctatgatcaaccagattggcgagagattcatggctgaagacacgtttgccaaatacttcgccatgttgaccttgaacgccatgtcgactcagaagaagacgtggacgctcatcgaccagaacagtatcgatcggctggagaatcagggtatcgattacgggttcgtcaaataccagaagggcgataagctcgaaggtcttctgggcgaactcgaggaatttgcgggaacggacaatgtgaagaagggcgagacggtcgaggatatcgcttcggagatcggagtcgatgccgttattctgcaggcgacgatagaccgttggaacggattctgcgaaacgggggtcgacgaggatttcggtgcgggagccgagattctccatccgatcggcgatggcccgtactacgcggttcatcccgatcggttcatcagcgcaaccattgggggcatcaaggtcgatcggcagaaccgcgtgctcgacgaaacgggcgaaccgatctcgggcctcttcagcgcgggtgtcgatagctgctgtctgtataaggagacgtacaacatccagctttcgggaggcatgcaggcgtacaacttctattcgggaagaaactctgtcagggaaatcctgggcgaaagcaagtaaagcgcgctagcgggaaggcggctcttggcgggcgaagccaggagccgttttttgctgtcggtctgttcctacgcgggatcttgccggctgaccgtgtcgggtttcgcttgggagaagaagtcaacgagcgcggtgaggccgcgggtcatggcggtgccccgcgggatggcgatcgacgcctcccaacgtatgggatcttcgggtatcgggatcgtacgaacgtggggccgatcgagaacggttatgctttcaggtgcggtgaacagggctttttctcgcatggctatcgtttcgagggatgagaactcatggatgccctgcgtgtctgcgatcgacggggcaaagcctgcgctgctgcaccatcgaagaaacgattcgtttcccttttgctgggggcccgggcagatgaatcgctggttcttcaggtcgtcgagggatatctcggctttctcgaaaagtggatgacctgcataaacctgtaggtatacggtttcggaaaacacgggaaacacggtgaacctggttcgctctatcggttcgatggcgaagcatgcgtcgtaggttccggcgagggttttctcttcgacggcaagatcggaatcgtcgctgaggatcaggcggatcgcaggatgctgccgctcgaagtcttcgatgagcgaagttccgagcgctcccatcacgccgtaggcgagcccgatgcgcaggtcttcctcttggtcttcggtatcaagggagaaggcgagcatgcgatccctcgaatcgagaatgatcttcgcttcggtgtagacgctctttcctgcggaagtgagttcgacaccgcccacggatcgggtgaacagcgcggcgttcagctccgcttctaaagatgagatggctttcgaaacggcctgccttgaagagaacacgcttttggctgccgagctgatgctgccgttttcgcacacggcaacgaacatgattagctgatcaatggtcacgtcggtttcctccctcaagccatgatacaccgcccgatgctttggggacagggcggggcttaccgcgcttcgacagcgccgcgcatgtggtcgcgatgctgtcgaagcgagtcaggcgatttcgggggagttgggcgcctagctcatttcggcgaattccgaggcgagcaggtgcggaagcgtcaggcagcatgcgccgtgattctgtccgaagacggcgaagctgtagatgcccgcatagaaatcacctgtcatgatgcccacgttgtagaggccttcgatggggtggttgtcggaatcgcatacgcggttgtgctcgtcggtgcgcaggcctccgcagatggtcaggaagctgggaagattgttgcccgagctgaagtcgctgccgatctttgtcttggctccgtagaagggcccttcggcgatggggaagagaaaatcgggattcacctggtattcctcgtcccggccgctctccgcatagccgttgtagcgttcgatggtcgctttggcgttttcgacgtcgaggccttccatttgtgcgagcagttcgtcgagagtgtcgcccttgacccagttgccggcttcgacttccttttcccagcgggcgatttcctcttcgcgggtgaggggcagcgtcccgttggtgtctttgtacgagcagccccactgcgaccagccatgttcgctgcggcttgcatatccggtatcccatacgtagtaggcgcagtgatcggggttcatgaggacggggtaggcggcgtaggcgaagttcgtggtttcccgcatgaagcgattgccgttcgcgtcgaggttaatgccccagaagttcgcggcataatggtacttcggcccaatggctccgcagttgatcatgggtgcaacaggggcgttttgccaagcggctccaacccacaggcccattttatgcccgtcgccagggtatatgccaacgaaggaatccatcaggtcgtagttgacgtcgtcctgtttgtcggtgaacgccagcacgtctttgaaagcgtcgtaggcgaacggcgcgtacttcgccatcatttcccggttactcgagaagtcgcccgttgccatgacgatgcccttgcgcgcaacgtacttcacgtaggttccgtccttccgctcggctacgacggccgatacgcggccggtgttgtcgttgtcgcggatgaggtacagcgcgcgggtcttccagtggatctcgccgccctgggattcgtattcggtggcaaaggccttggctaccttgggcgcaccggtcaccgggccgcacgtatcgtcatcggtgtagaagcagtgcgaggacggcggggagtcgaggaagccctcgggatcctcgtagccgttttccagcatgacgtgcagaccctgcttttccatgatgtcgagcatccagtccatggtttcggcagagttctcgatccagcgcgaccatttctgttggtcggtcacatggcctgcggaatactgctccatcatgagaacccgtttgagttcaggggagtgcttgtcgtactctacgcccatttccttttggaatttcgatccgaatgcctggtacgaaccgccgcgcccgatgggctgggagctggcggtgaataggacgacgtcgacgcctttttccagacaggaaagggccgtgcacagccccgaggggccggatccgatgactacgacatcgtgctcgatagtctctgctatgtcgctgtcggcaatgggctcagggggaatttcgaaactgtatttcgcttggttgtcgaccgattgaatgagctcgccggttgctgtgggcgcggttgcctctgcgctgtcttgggctttgggcgcgcatcctccgagcatgccgagcgacaatgcgccgatcgctgcgcctccgagaaagctccttcgtgttatgttgtttccttctttcatagttcctcccatcgtttccgctaacgagccgatcatacgagggcgcggcagggtcgaatagaagggcatgcgttgcgggggtgcagcgagatgttgcggggttgtgaagccctgcggtgcgtgcgtcctgcggtctattgtgcaaactcccaataggatgacgttaagagtgttcgcaatggtgaggaaaagcacgatggtgcaaattaaaattctttgcatcgcgtcgacaacgaaaggatgattcccatgtgcttcagaccacctgacattaccattggcgatacccctggcgcccctggcgctcccggtgccccgaaaccccctggcgcccccggtgccccgaaatcccccggtgccccgaaatcccccggtgccccgaaatcccccggtgcccccggtgccccgaaatcccccggtgccccgaaatccccgggtgcccccggtgctccggcggctccgggaaagcccgaagggaagccgaccgagtaaaaggcaaaacctccagtgcaacgcgcccgtcttttatgcggcgggcgcgttgtggttttcgtaggcgaacgtaagcgagcctggaaaagacgtagccctgttccctattggagattagaatgatagcgaagttttacccatccgaatttcaaatgccgtcggataatcgcttcgactttttgggggaagagagaatgggaatcgactacaccaaccttttcagtccggttacagctcctacgataaatgcgcttgtcgattttctggcggacttcgaagttgtatctcagccagccgatatgcgtcgtcgcatcacttggtgctccgtcccgatagccgatgatcaggacgagcttatgagcgcggtcgtttcggcggaaaagcaatcgacgttgctttatctgctccgactcgataatgtcgagcaggaaatgagagcgaacccctatgcgatcggtattttggtgctcaaaaagggagacagggaaagatccgcgtttgaggcgctcgattctcaggtggctaaaaggctgcttgttcttgtccataaggagagaaatatttcgcttatggaagtgcagtcccgtatccagctcatgcttttcagacatgggttttggatagaaaggctcatggggataatcgatcgtcagggtacgttgcaagagatggttgatgttagcgaggcgatactaggtacgtttctcgacgtttccgatgcgacatatggtttggttgcgtacaccaagaataccgctccgcccgatgcctatagtcgagagcttattcagcttgggtttcatgggccgtttgttatggagcaggctcaagagcacggatttctctccgattggcgcgagcagaagggcatcgacgttctcggtcccaccgaacgtgtgccgtttcggttcatgaccgatattattcgtcttgagggaaaatactggggtcatatcgtattggtgtgcagcagcaagccctatacgccaggactcgaagacatgttcgcgttgtttacgggtatgtgcaaacggctggttgagcatgctgcgaaaagagataccaagctattcagtccaggtagttccgttctgctgaagcttctacgcgatcccctttgcaatcgggattacgtatccaatcagatgtccaacgtgggcgtcgaaacgcgcggatgcttttgcgttgcttgcgtcaatcgcagttggggtgattgtacggatcagccgcattacctgatctctaagctgcgggtcaagtttccctctgcgctcgttttcgattacgaagatcgaacggtgcttctctttacaaccgagttttgcgaaggcagggcaacgtacgatttggcacaagagttcgaatcgttcaactaccgctatggatgccgtacgtttctatccgatcagttcgaatcgcttttcgatctgccccttgcctatcgacagacgaagcttgtagagaaataccgtcgttgcataagagctttccgaaatcctttcgatggggagagcgagaagagctcgttttgcttcgaagaggcattctgcatctgtctcgaagacgagagcgcgcgcatggacgacgatctgctctcgttttgcttggctaattcgaagatagacgagctcattgcttcgacagttgattccgacgtttcggatctggtacttctctacaggttcttggcatgcgagagaaaggccactcccactgcgacggcgctcaatatgcatcgaaacaacgtgttgtaccgcataaagagcattgagcgaagattcgggttcgacctggacaggcaccatacgcgcgagaggcttctcgcttgctatcgcttgagagcgcttcagtctgctgaatttagatcgtcgttgcattgcttgcaggcggctccacgggagcatcgatgagggggttttcgttgtgcaaatctacaatgaaaagcttttcttatgagggaaaatgggggatcgtctcgttgctggtgatgccataatcgcccgaaagcccaggttcgagtgcgaggcggtctcatgaaaaaagttactttgcccggaatgaccgagttttcggagataaaccttctgtttctttcgttttaccgcgatgcccgggatatttttttcgacgacgttgcgatcgaaagcgtatacggaggcttttccggaagtcggtggtgcggtggtagaaacaatttcggaccgttgtccgatatcggaaaaattcgtaatttgatcagcatgtataatgaactcggtgtcggatgcaacgccacgtttaccaatcaatatgtcgatgctgccgcaatcgaagacgatgcgtatagtcgacagatagccgaggctcttgcagcatcctcgccggtacgcaacggggtgatcattttctcgaatgaggttaacgcgtacgtcaaaagcaatcatccgcagctaatccgcgtttcttcgaccactaaggaaatcgaaagcaaagaggcgatcgagcaagagctcgcagggtttgatagagtggttttgagctacaatctgacgaaggacgaaggattcattcgtgagctttcgcgccccgataagatcgaggtgatggtgaacgaatattgcatgctgcgctgtccgttcaggaaggttcattactccaaaacaagcgaagatcaggtgaagggaaggccttcaggatttacatgcaagcacgaggcatcgcctcaggcgtatgggttcctgcaagggcttttgtacggtgacgcctttttgcgaaacgaagacgcgtcccgctattccaaggatctcaacatcgagcatttcaaaatagtcgggcgcggcctcgcccggtacgacatcgtagattcgtatctctactacctcgtcaagcccgagcattggtacgaggttcgtgactatctcattcatcggaactacctgtaaggctcattgtattttcgcccaatgaaaccgtattcatagtggagaaaataaggccacgtagcgtagtggcgctctctaaaatacctcccatgaaaggtgggtcgagaagtcggcgagtggtttggcagcgttttcgacttcgtttttcatctggcttgcgcagccttcatcaacaggtgctcgcgaaaccgaaaggcttccgggcgtacactcagagaggagaagatcgcattggagaggaaatcacttgaggagctctaccataagggcgagcttcaatgggaggaagatgagttcacggtttgccgtagcttccagttcactcctcctggatgccacaacagttgcggcattctttactatatgaaagatggaaagcttgaccacgcagaaggggatccgctgttcccttacaacaacggtaggctttgcgcacgttgcttgaatttgaccgaagcggcttacggcgaaggtcgcctgaagtatcccatgaagcgtgccaaggaggatcgcggtaaggataaatgggagcggatcagctgggacgaagcgctcgatctcattgaagagaagtacaacgagcttaccggcaagtacggtcctgaaacagttttcggtttcgtaggcacaggccgcaacgtgtgcttccatatgccgtgggtggtgcgtaatgcgtttcgcagccccaatgtgttctgctcgcttttctcgggcgattcgtgtgcccttcctcgttctgcatcaacgggcgcgatcatgggcggtctgcctgagcccgatatgggtcagttcaacgaatcacgctacgatcatcctcagtatgaattccctggtacgattctgatctgggggtctaatcctctcatctccaacgcagacgctttcttcggcgcatggattaccgactgcatgcagaaaggcggctcgaagctggtagtggtcgaccctcgcgtcaactggcttgcatcgcgcgctgaggtctacatcccgattcgccccgctgccgacggcgcggttgccatggccatgaatactgtcatcatcgaagagggcctttacgatcacgagttcgtcgagtattggtgctacggtttcgaagagtatgctgcggcttgtgcggagtggactcccgagcgcgcagcggaaatcgcctggtgcgatgccgaggacattcgtcgggccgctcgtctcatcgcgaccaacggtccgtgcgccttcccctttgccgtatcgaacgaccacaagcgcaacggcgtttctgcgtactttgcgatgttcggaatgcttgccatcaccggcaactacgaaaagcccggcagcaacgttatcgcttcggacccgtggggcgttggcgttctcatggcgtatgctggcggcagtaccgacgggcagattgcgcccgaaaccatggagaagcgcatcggctacaagggctatcccatgcgcgaggccggcatgacgaccgtcggtctgggtgacgagtgcctgcgtaccctcgaaacgggcaagccctatcctctgacgatgtgctggatgacgggcaccaatcctatcgccaacatgtctgcagatgcaccgcgtgcttacaatgcgcttaagaaggtcgagttcaccgttgtatgcgattaccatatgacgccgacgatccaggcgcttgccgatctggtcctgcccgtcgcgttcaactgggagcgcaatacgcttcgtctgtggtacacgcctgttcgcgcgacgcgaaagatctcggaataccatgagtgcaaatccgacgaagagatctgcgtgctggtcggtcagcgcatgaatcccgagttcttcaaggagaagaacatcaacgacgatgtcgatttactcgagtacatcatcacgtgcgccgaccatccgacttctacgtggcacgagctgatggacgacacgggatatctgtggcccgagtacgagtacgggaagcacgagagcggcaagctgcgtcccgacggcgcggttggcttcggcaccccgacgggtcgaatcgagctgtattccacgttgttcgctcagttcggcttttcgccggttccgacttaccaggaacccgacgagagcccgtactcgacgccggagttgttcgaggaatatccgcttgtgttgacgactggtgctcgtaactgggaatacttccactccgagcagcgcgatcagccccatatgcgcgctacgcgccccgatcccatcgtcgagatcaaccctaaagatgccgcgaagtacggaatcgaaaacaacgaatgggtatggatcgaaaacggaattggccgctgccgccagcgcgcctgggttaacgacggaatgctcgaagggtgtgtgtcggccgatcatggttggtggttccccgaacaggatcctgaggagccttcgttctacggcgtgttcgaatcgaacatcaacaatctcgtcgagcagtgcaatccaggcgcgtacagtttcggcgcaccgtatcgcggcacactttgcaaagtgtacaaatgcaccgatgagaacagcaagatcacgcctggtcagcagactgtaaacggcggattccatgagccgacgtatcgcggcctcgtcgagccgccggcgaacgcgtagaagggaggatggaagatgagcaaaatgggattgtttatcaactacgagtactgcaccgggtgccatgcttgcgagatggcctgcgctcaagacaagaagctcgaagcaggcgagtggggaattaagatttcccagtacggccccatcaagaatcgcaacgggcaatgggaactcacctttttgcctacgccgacgaagctttgcgacatgtgcgccgatcgcgtggaaaaagggaagcttcccgcctgcgtacatcattgccagacgaactgcatgaagtttggcgatttcgaagaattgagtgctttgcttacggataatccgcgttcggtaatcttttctgtttagctgaaaggcggctggctggcggaatctgcgctcggttggccgccatccggccggcatcggtgggatgtcggccggcgtttaacgatgcgacgattctaaattggaacgttggcggggtggcgcatatggtttcatgtgattgctcgacatcgcggaaaccatctgctctatctcgtagaagggggcggttcgcacaatggggaatgcgaagcatatacgaaatgcagcgatctctatcgcgattatggttctgttcaggtttattccgcccattggggctatgactccgatgggaatggaaatactgggaatattcatcggcgccttttatgcttggcttcatggggagatgatctggtcgagcgcgattgctctgatcttgttcggatttacgggttacttcgacaacgtgaccgcggtgttcgcatcggcgatgggcaacggtacgatccagatcattctttggatgctggtttattcgtcgattatgatcagttctggcctcggtgagcatatcgctaacaggatagtgtctttcaagctgctgcgcgggcggccgtgggcgataacgattgcgatcatggctgcggcgtatttcacgtctatgacgggagctatttttgcggcgatcatcatttgttggaattttgtctatctcatagcggaaaaggctgggtatgagaagggcgaccgatggatcaagatgatgctggtcggcgttgctttttcgacatgcgttggtgttatgacgcttccgtttcagaccagcgtagttgcgacgttcgggtatctcttcgctgtttcggacggagcatacacctcctacgattaccttacgtacttgattttcgccctgattctcggattgacgaccatgtgcgtgtacctgctgctgtgtcgtttcgtcgttcgtcctgacatgggtaaattgaagggtttcgaaatgcctctggggcatcgcgatcctctcgatgccaagcagaagattgctgcgtggtcgcttgtcggtttgctggcgataaccgttgttccgggctgcatacccaacgataccgtgcgagcgctgttctccacgcttggtcttccggcaagcattctgctggttatcggagtggtgatctttctgcgcgaccgagaagggaaaccgttctttacgttcaaagagctggcgaatgcgggcatatattgggatatggtgttcatgatcgcggcggcgataacgttgggtttggctctttcgtccgagcaggccgggctttcagcgacactgctcaatctgctgagtcccatgcttgccggcgctactccgtacgcccttgctctcggcattgcggttgtcggattgataatcaccaatgtaataaacaactcggtttgcggtgccgttctcgtgcccttgtcgttttctctctcgctctctgtgggcgcaagccctcttgcgctggcggcaattctgggtttcatctccgacatagggctgcttatgccgagtgcgagtcccacaggagctcttctggcggcgaatacggaatggataacgacgaaagagattgttccgcaagctttgatctgtgcgttctcgacgtttgcggcggtcgccgtagtgggcattcctctcgcttacgcaatgttctgatcgattgcggcgcggtaggcggtgtcgcaagacctggtattcgatttatggagcgcttgctaaggcgcaaaaccaatgttcttcactatataggaggagatatggaaaccaaagatataaaaacaagctccgaaagcagcggagcgtcggaggcggttgccaagcccgcaaagaaaagcccgccgaaatggcttctcgttgcagcatgcttgtcgtttgcccctttgacgaacaccgccggcctcatcatgccggtgcttggcacgatgcagcagtcgttcgccgcatccggtgcggtatatcccgactggctcgttcaatgcattcagacttccttgatgttgtcggcgtttatcatgggccttctttttggtcctgccagcaagaggttttcgctcaagacgctcggtgtggcgggtatcgcaataaccatggtatgcaatgtcgtgcctggcatattcccgcaaggcggcctttggctgttcgttatcatgcggttcttgtccgggttcggtgtcggtttggtttatggatgcaacacgagctgcatcgtggcgaactttccgccggcgcagcgcgctggcttgattgccgcttcggttgcggttatgcaggcgagctcgatcgtctattctttcgcagcgggatatctcggtgccatcgactggcggttgaacttcatcgccatgagcatctttgtgattccgatgattctggtgatcgtcggaatgccgagcaaatcggagctcgaggtcaaagagagcggcaaaaagcagaaggtcaagctttcgggccagtgctggttcgttatcgttatggctcttctgtacatgcttatcgcaggttcgttcaacctgggagtttcgcagcagcttatcgctttgggtatcggtggtcccgtcgaagcaggtcaagcgctcgccgtgtcggcggttgcaggtttgctgatctcccttgtgtgggctaagcttcgctctctgttcggtcggtggtcgttgctggccgttgtcatccttggcgttatcggatacgtggttgcaagcatgacgacctcgttggtggttgtttacgtggcggcagcgctgatcggcgcccagtgcggtgccggtatggcggaggtgaacacatccatttcggaaaccgctggtgctgcggccactccgactgcgatcgggatctataacgggctgagccgcctttttgggttcttcctttcgatgattctcgctcttattcaggtcgttttcgggttcgttgggcctaatgctttcatgatggcttcgcttccgatttgggctgttctcgtggttttcggaatcatttatgcggttaaagtctacaagaaacccgagatggtcgactagcaattggacaagtgcagtggaatagatcgctgagctgcaaagagtgtacgtgattgggcggctgtcatcatgaaggtggcagccgcccaatgcaaagagaagagaaggggggcttcaatgtgcggattgtcgtgcgtacattgcggcaagtgtccaggtaaagaatcattcgcccgtccgttcgggacgtgcttgaaatgcggaaaaagcaatgatccaagcgccgacacgtgctcgttttgcggcgcgcgtctagtgaaaccccctggaaagccaatgggagtcaaagccgttcgggttagaggtgcgtcggatttgggctagtgcgaccgtagacgcttctcggcggggtttagagccaagttggcccgtgcaagcgcgtattggctataatgcaacaatgaacagaaacgctcgattgataataggctactcttttttcgttgcggctaactcgtttacgttgcgcgagccgacgttgatgttttccgccgacttgctctcgcacgaatggctccgtgcggcaacgtatctgcccttcgcgctcgcaacgatagccatgtgctttttcgttctgcgaagcaagaagaatgcaagccgcttgttgctcgttgcttccgtggcgtcgtttctcgtcggcgcggcattgctcgtggcaagttgggcgctctcgggcgagctgttcgtatccgtcttgtccatgatcgtgctggcatgttactgcgcgatactgttcactgcgtgggtgaacgaggcggttaggcttgagaagaacgacctgtggatctatctcatctcgtcgtcgatcctcgcagcgctgatccattttctgtgcgttgcctttattggcgatgcttctgcggcgcctgcgttcctggtgctttcggtgctgtccctcggcctgctgctcggagtttccaagagcgagaacgccattgcgccaacgcatccttcctggggcaccgacttgcggttcgtctggcagataatcagcgaaaagggactgctcatcctgtatctcggcgcactcggattcgtgtcatccgtctcgcggatggtgctgtgggaagagggcatcgttttgctcagcagcgtcgagatggtttccgtcgttttggcgggggtcgttttgttcttcgcgttgttcgtcatccgcgcccgcgtcaacgcggaagagacgattctgtgtctcatccccatcgtaggtttgttctgcttgggcattcccctcgcgagcgatccgctccatcttgccgcgttcggcgcttccacaacggcgtttacgacgggtcttttgctccttcaggttgtatgtcgcgactacggcagaggcgatgcgagaaaagcggtcgctgcatactgccttttggcggggttcgtctgcgtgctgaacgtgctcggcttttacgcactcgatgctttgaacagcgagtcgggcctttccgaatacatggcgtcggtgtttatctgcctattcgttttgttacttgccctgcttgtcgataggctgccgttcagtaagacccgatttgaagaagccgaggcagagactgcttccgaaaacgccgcgatcgccaatcttgctcaagaatacgggcttacggagcgggagcgggaggtgctcgagctcatggcgaacgggcgaaacattcccgccatagcgaagatcctctacgtttcggaaagcacggtgcgcacgcacaacaagcatatcttcaagaaaatgaacgtgcatacgcgccaagagtgcctggacctggtggcggcggcatccggtacgggcgtcaagcggtaagctcgtttgcgcccgcattcggcgccgtcagctgttggacgatcgtcgggttgcacctgcgttggttgggtgggagggacgctcggcgcaacccgttgctcggtgtttacttcacataggtttcgaacgcgtggttcacggcttttctgcccgaagcgatgccccagccgctgcaggtgcccggcgtgtcaatcgtgtagatgtttcggtagagcatgcatccgtcgtttccgatcgcgtacaagccgtcgacgggctcgaagcgatcgcggacgacctgggcgttgtgattcgttccgatgccgccgaccacgcagaagacaacccagatgggacgcgcaatgtaaaatgggccgttctcgatgggctgcatgtgctcggcgctctttccgaaaagttcgtcggtgccctcggcgcacatcctgttgtagtcctccacgaacttctccagtgcgtcagcgtccaggttgtagccttcggccagttcacggatggtatcgcagcggtagaccgaaccgtcgtcgttttccacggcggcttctacgaggctcgtgaagtcgcccgtcgagtcgacgccccaggagctgtagccttcgagcatcttcgtgtcccagatcataaagtagtctttctggttccacttgggaggattggagtaggacatgttggtgacgacgatgtcttcggcgtagaaacgctcgcagttctcgttgatccaggggatttccggctccaagcagaacagcatgttggtctggccttgcggaacgccggcaagcatgggagcgttctggtcgcagcagccggggatcgtgtcgacagcgcccatttccatagccataaggtagccgtggccctgtgcgttttcgaacatgcaacccagacgatcttgatcgtagccgatgcgggaaaccagctcggcgttcgatccgaagccgccgcttgcaaggatgacggcttttgcgttcacctgcagccagtcgccgtttttttgctgggcatagacgccggtgatttttccgttctcgtcggcgatgagctttttggcggtcgtgttgacgatgacgtcgactcccagttctttcgtgcgggccgacattgcgggcacgtagcctgcggcggctttgccgtctttgtaccagtggaacgtgttgaacttgcccgaatggtagttgtcgatcgtgccgttaaattcgacgccctgctctacgagccagttgatgttttcgcctgccacattgaagaattccctccacagcaacgcgtcgcttcgttgctgcgcttgcgaaagctcgtcgttgagtatcgccaggctgtcgacctcgacgcctgccgttttcatcatttcggaattgagaccgaacgttccctcgacgcccatgcgcgcaccgccgccgacatcgtcgcccgattcgagtgcgatgacgttcaactccagttcgcctgcctggacgcatgccgagagccccgacagaccggcgcctacgacgcagatgtcgcattctttggtttccgacggctcgatgaccgtctgctcggttgtcgaaggctgggcatccgattccttgcccggctcggcggcgcatgccgtcagccccgccatggcggcaaggccgccggttactattgcgcttttgatgaagctccttcgatctaaactcatttccatccctttcgatcgtttgatcagacgcccggtgcttctccctgtaagtgcaccgagcttctttgttttacgatggaagaggaaggggggatgggggcaaacctggggatttgggatatcccccagagtaggggagtgtgtgcgagcccttcgttgctttggaccagcgcgaagatcgtgctatgtatggggatcgggcgggcgcacgtcgtgaatcattgaatgatcgttaggtgagactgtttgaggcatcgctttggagtgctccggcttcttccaccatactgataagttcctgtttgctatggatgccgagttttttgtatacggctttgcaatggctttgcacggtgcttttcgatatgaacagcgtttctccgatgaaggttgccgatcggcctttcaccatgagctccaccacttccaattcccgctcgctgatgccgtaggatttctgcaagtattccagctttgcgcccaatgacccgatgacatcagtttgggaaatgctcttttgctgattgcggttttcgccgaaggcgtaggcggccattgcgagaatccaaatggcaacaagcgcaatggttagcagttgcaccgtatcgtaggctccgttttctgattggattgaagatccgatgatggaaccggttgccgaagatgcgtagaagagcgccgagaaaacgccgtacacttgcgtgcgcggaagactgtattcgctcgaaaaccagacgcacatgataatcataagaggcgatatgcagaagaagataagcattactgcggtaaagagagcggcgctgaaggcctcgcttgccaaaggcaaaagcaaatatagcaaagccgttgtgggtaaaaggacatcgtagatctttataatgaaggcactgctttccatgagccgtacaaacggaatgagaaccagaaccgatagaggcatggtgaggcaggtgacattgtttgcgagtgtttcgaagtgggtgcttccgaaagactgcgtgcgcagcatgcccaccaccaaagtgcaaagaacgatgcagataagcggttttgccatagtgagggcagtcgatggctttagctgtccggtacgttcgcttttcgctgtcgacgccgaaaatgcaccgtgcgtgcttaagcgaatggagagggcggcgaacgcaatgaacgatatgccgagcagggcgatgatggcgtagccggtcagcagaatgcttatcggcaacacgatgaccgaaggaaaggccgaggcggcaagcgtaacgattgcgacatgttcgcgcggcaggtttgcaaaggcgagaaagtagcagacgaacagccccccgcctccgatgggaaataagaccgaaaacgcttcccaagcagccgtttcttcaataattccgattgcatagaaaaagaaagacaagaatccgcctgcgaaaagaatcattgccgtagtgaatgcggctcgaatacgtttgccgttcgcgtatgcagtgaagccaaggatcgccaggggcaatgtgcaggagcgcagggtgtagtcagcacggctaagagaatttattgcgtcgggctccaaagctagtgcctgaggactccacatgagcaggacggagagcgcaagcaaaagcccgaaacccgtccaaagcgaaacgtgaagcgtcagggctttccccacaatccctcctttgcgatcgcctcatagcacccttccgtattataccaacctcttcaagtcgtgtattgctacgaagttgcatatgtcgcttccgaaggggatcgaagatcattttccctacttttatgggatgccctatcccgacaaccccatcttctatggaatgggaggattgccatggttgggcgacactcaattgggtttgttagtcatatgccggcggcggagattccaagacgtataaacgcgcttcggcatacaacaaggaaggaacaggatatgggtacaacaatcgacaggcgttcgttcgtcaaggggtttgccgccgcaggtgtagcgggtctgggcgcaagcgttcttggatgctctccggcagcagcgggaggtgatgccccttccgactccgccatctcatcgggcgataccgttttaagtggagaaaactatgcggctacgaaatgggattttgagattccgcccgatccgattgacgaatccgagatttctgaaaccgtcgaggcggatgccatcatcatcggttcaggattatcgggacttacatgcgcgaacagcgccattgagtccggggtgaatgttgtgctgttctctgcaagcgatcatccggttgctcgtggcggtacgaaccatagcttcaatacgaaaattcagaaagcgcggggaatcgaatacacccccgaaacagttcgaaagcaatttaagttcgagcttcacagttacggggggcagataaacgagaagctctggtggcgttgggtcaacaactcagaagagtcccaaaactggcttatcgacatcatggaaagcgaaggcgccgaagtcaccatcgaaaaaccctacgttgacgatgatggggcatacgagcagctgccgtctgccttgaattttctgatacccgagccatcaggcgagctgaaagaatacatgctgtcaggggcgatccaggatatcgccgctgcatcgaacaccggcgcattggctcaggcttttgtcatggcaaagaagtttaccgaagctggtgggaggatagactacggaagagtcgcacagtatctggaaaaggatgactcggggcgtgtgattagcgtgatagccaaagagaaagagggggaaaggtacgttcgctatgtggggaagaaagcggttgtcttggcgacgggtgacttttctcagaacaagagcatgatggcgaagtattgcccgctcgagctggattatctagccgatcaaccggttgattacaacgctctcgatcgtttcggcgggttgatgccgggtgatggtcagaaaatgggtctttgggcgggtgccgcttggcaaaagacgtatcccaatgccagcagcattatagatatcatgggcgcaccgaccgttcaacatatggggtttcatcctggtttggtcatgaatgtcaacgggaagcgcttcatgaacgaagacaccaatgcggttgagagcacgcctctgtgtcagcgcgagccgcagagcacgtatttcgcaatatgggattccgactacgtgaatcactacgatgcatgggagcaattcggcgtgacgctggatggcgataacggtccgaagccgaagagtcccgaagaggagcttgcgcgctgggaagatgctgtggaaacaaagctttatttcaaagccgactccatcgacggcattcttgaacagcttggtgacatcgatgtagctgccgcaaaagccaccattgaggcatataatgtctattgcgagaaagggatcgacgaggaattccataagaatccaaagcatcttgcacccatcaaagctggtccgttctacggcttcaagagaaccattaattctgcacgattcctcaatgtaatgggcggactgcgtaccaacgagaatcttcaggtttgcgatgagaacgacgagcctattcccgggttatacaatatcggctgcatgatcggcgatgcatattcgaacatatacacttttatgttctcggggcagagcctgggcatgacgtgcgatacgttcccctatcttctcggtcgcgatctcgcttccggcaatctcgactaagcacatccttcggcaatccccgtcgggagccggctggttcgcggctcccgacgttgtggtgctctctcggcggttttcggtctacttgcttgttttgccctgctcccaacggcaagttgagccgtttccttgtcttcggtcgccgcgttcttcccggcgatcattccgaagagaagcgcttggatcaagccgttgccgctcgaataaaccgatccggcgcggcaggaaaacccttcggtgcagccgcccgcggcgtacagccccggtatcagggtctcgtctggacgaatcacgtgtcctgccacatcggtcggcatgccgccctgcgtgtggcgtatttcgccggtaatcttcatggcgtagtagggcccatcgaagttttcgggcaaatgggatcgattgaagctgtcttcgcctttcgctatgccctctttgtaagcctcgaaggttttctcgagcgcagcggcgtctatgccgagcgcatcggcgagctttgcggcggttgcacctgttgcaacgtagccggccgattggcgctcggggaattctttgcttttcgctgcctggatgtcggtgaagcatatgtatccgatgtggtctggctgggcgagcacatggggcgacaggtcggagtagccgccgtactcgttcacgaagcgttcgccgttggcgttgacgatgatggctccattggtcgcgagggcctgatggcctgcggttgtattgctgtccactccgcggaacgcgtggccttggtaggctcccatgcattgcagctcgacgccgagctcttctgcccacttaaggctttcgcccgttgcgccgatagccactacttttacagcatctgcggtttcggggcagtactgtgcgatcatttcggggttgttcgcaaatccgctcgtggcgaacaccgtgtttttggcggttatcgcatagtctttgccgtcgtattttccgtaggcgccgacaaccgcgtcggcatcgtcgagcacgaggccctcgatttcgaaggagagcatctgggtgatcgaatcctgggccgtcatatgctcgatgagggtggtgacgagtccctcgccggtgccttcggcgatgtgcatgcggcgggcggtttgcccgaagcgccctctttcatcgaggttccaaacaacgcccttcttttcggtccattcgatgaggtccttggcgttctcggccacggtgtacacgagatcggggcggacggtgtaattcgtcggtcgcaaaatatcggtagccatcgcaaagatgctgtcttccacgcctgcttcgacttgctggttcgttccaacgacggggatggcgcctccggaaagaatcgtcgcgccgccgagctggctgagcttttcggtcaggatgacctgagcgccgttttcggctgcgctgattgcggcgcagatgcccgcgccgccgccgccgacaaccagcacgtcggtggaaagctgttctctgtcggcaacgtccgattgccttttcgcaaaggcgtacgatccggtcgattcaccggctgagctgtttttctcggtggcggtcgagggcgcgcaaccggtaatgccgacgagggctgccattcctgcaacggcgcccgctcccgctaaaaacgtgcgtcggctcaatgctgcatcgtgtgatttcccgttatcgatcatatggtccccttttcacggtatcggcgcctccctggcacctttttccatttctttttcggattgctccgaagcacacctagatcgtatggggcgctgtcttttcggtcttcgacaaagatgggtgaaaagagtcggagcagccgacactttttgcctaattcgctcgacaaaaagtgtctaaatataacgtttcgccatgtcggcgaacctgggatggaacgttgcgtggcgttgctttcgaggttggcgggccgaccatgttagaatgcgaggcacgaacctcgaaggtgggaggctcgggcaagggggcatgcaatgcggctaccaggtgggggttgggaagctccttctaaagacgaaaacaaaaaagactcgacggcgatttcgaatgctgcaggaaagatcgcggcgaattcttcgcttgagtggcgtgcgggcgtcctgttggttttcgggttcctgttcgcatggatgtacatcgcgaaggcgtttttcaaagaatcgtatttcgccgtaatcgaatccgtcgacggcatactcgcctactgcttctttttggccgtccttatcggcttggtgctgttggcttcgattgggcgaaggcgatttgtccgattcgctcgacggcgcggcgtcgttctcgcgttcggtcttctcggttcggcgagcctgcttgcggttcattcggtcttgggctatgcaggccagcctttttcggcgattgcatgcgcgctgtgccttgtggtttttgcagcggggttcgtcgtggtcttcttctcgtgggttgttgaaatcaaagagctcatgttctcccaaaggctcaacacgatcgtcgtgctcatgctcatagcgatggcgctggcttacgttgtcgttccgagcaatctcaataacagtgaattccgagttgtcgtgcccatcgcaagcctgggtttatcgagcgtgtgctacgttgcctatgcgagattgcgcggaggccttgatcccatcgggtctgcggagaagtgccttgaggggaccgggcgtcggaccgaacgcaaaacatggctgattccgctgtccttgctcgtgctggccataaacttgatatcctacgttgagattttcgttccgggataccatgtgataaccagcgagtcgcccctgacgtacgtgttgccgctgatactcagcctcatgctggctttgatagcggttcaatcgggaaagacgccgtttttcaagaacaagctgttttggtatgcctgccttgcttttcttgccgtcatcttcctgagcttcttcatggccgtattcgttttggccgttcaaacgaacttttgctttgaggttatgtacttgttccgccgtatgacgaagatcacgtttttcatcatattcatggtcatcgtctaccaagaggatttggatcctttgcccgtttttggagtctgctacgtcgtcgccctcttcgtgccgtctctcgcagtaaacgccgtccgcattttcctggagagctatgctccggatacgctcgctttgatcggggaatatgctgttggctatgcattgatactcgggttctgcctcatcctctgccttgtgttcgtttgcgtcatgttcgtcaacggcagcattgccaagatgacgttttcgccgacccgaaccgatgcggatcgcagcatcgacagaagcgacgtatgcaatcggataggggatcgcttcggcttgacgcagcgcgagaaggagattcttttctgcatctcgcttgggtacagcatgaagaagacatccgaggtgctctacatatcgacgagtacggttcacgcgcacacggcgatggtgtaccgcaaactaggcgtgcactcgcgccaagaggtgatcgatctgatcgacgctgcggcataacggttcggggtcctctgaccgaggcaggcggggcgatgggaagactgcgtggacaatggagttcgatatgggaatcgcaagcagccctctccctttgtaggttcgaagccatgtcgttctacgttggtttgccgaagcacgatcgatagcttgccttggggcgattctgagtttcgccaacaatcttgtcgggccgtcgaagccgttttggcttgcttctcgaagcgcgctggcgtcaggggcccgtcaccatgtatacttgcagggcaagagtgaaatatattactcaattagtaatcattctgtactcgatgcaaggacgggcttatgaggggatcttcgcaaaacgtcaaaggcaaaggcgagcggatcgaccgccgtttaacggcgcgctggtgcaaacgggttctttccctggccgtgtccatcgcccttgcggtttcgctttctccggcggtcgcgtttgccgatacggacgatgcgtcgacgtttacgctgggcggcacgccgcttgccgacatgctcgtttggccgacgggaggcccggctggtcaaagcatagccgaacccggttcgcgatacggtatcgatccctcgtactcgaactactctgagggcgatgcgggagtagctccgctgagcagcctgccttcggcgtacgatttaagaacatcggacggtgcacccgccgttacgtcggtgaaattgcagaatccttggaactcgtgctgggcgttcgcggctgttgcggcatgtgaaagcaatctcatcaagcagggcgttgcggatgcggtgtcgatcgatctttcggagcgtcatctcgcatggtttaggggcgccgcgattaccgcagaggaaacggcaggtttgatcagcgaccaaacaggcgagggcgcggtcgttcgtccaggggggagccctttggacatcggcggcggcatcagcacggcagctgcgattctggctgcggggcaaggcgttgtgactgagcagctggttccgtacaccaacgatgcgggcgagctttccgagagcgtagacaaggaaggcaaccttgtctccgagccggtgaaggacggcaattgggctgtggcttcaagcctgcggttttcaagcgcctatcagctcgaggaggcggagatcctgccaagtcccgccgtcataacccataacgacgacggatcgacgtcctataaatacgaccagcgagcaacggatgcggcaaagcaggcccttatggaaaccggcgcgcttgacatgggctatgcggctgatgtgagttcgccagggcaaagcggcaacggcgagtttttcaactatacgacatgggcgcagtacaccaatgagtatttcccggcaaatcatggcgttacggtggttggctgggacgactcgtttcccaaggcgtcgttcagcgacgatccggacaagcagccgcctgccgatggcgcatggatcgtgaagaacagctggggcagcaagaacggcagcccgggaaattcgatgacgtggggaatcgacggaacgggttacttctatctttcgtattacgatcagacgatcgaaaccttcgttgcatatcacatggcttcttcggatgcggcgtacgatcgcacgttgcagcatgatatcgtggggcacgacagtcctctgactcatccattgacaagctcagccgaaatcaaggttgccaatcggtttactgccgatgaggatatgacggtgggggcggtctctgcgataacgtataccccgaattcttcggtatcggtgcaggtctaccgcctcggtcccgattccgagaatcccgaagacggtgagcttgtggcaacgcaggcgacaacgccgtcctttgcgggattccatcgcatcgagcttgacaacaagctcgaagtgcgtgagggggagagcttctcggttgtcgaatcgatctgctcttcgtcaacttcgcgggcgggaacgacatggatggttcccatcgagcgaggtctcactcagaagtatgccgaagaccacgggttgcagtattacagttctcttgtggtcaatccgggtgaaagcttctttggctcggatggcgattgggaggacgcatccgggctgagcaacgatcccgctatgaccgatggcggaagcatcgcttacggcaatgtgctgatcaaggcgtttgcggactccacgccgtttcccgatgatcctgccaagccgattgagcctgtcgatcccgatcccgatcctgccgatccgaagcctttgccggtcgatgcgtcgggcgaaaccttcggcgtgaggggggatcttgcgtcggtgggagacgttcctttcgctgcgacggcgagcatcgtggccctcgccgcccttgcggttatggggcgcgcggcggcaacgggggcgaaaagggccgagcgcaatcggaaatgatgcggcgaaacgatgctgctgcagggcttccgtttgcggaaatgagccctaatcgatggtaaccgccaatcgggttcgctacactagtgcaatcaagctaacgcgcactatcgtgaacgaaggagttcgaatgtctgctgagaacaaagccccgctcgtcggcatcatcatgggttcggaaagcgacatgcccgctatggagccgtgcatgaagcagctcgaggagttcggcgttccctatgaagtaaaagtcgcaagcgcccatcgcaagcctgccgaagtgcacgaatgggcatcgaccgcggtcgatcgcggcattcgcgttattgttgcggcggctggcaaggccgcccacctcggcggcgtcgttgccgcatacaccccgaaccccgttatcaccgtgccgatgaagacgagcgacctcggggggctcgattcgctgctttcgatggtgcagatgccttcgggcgttccggttgcctgcgttgccatcaacggggcgaagaatgccgcgattcttgccgtgcagatgctcggcaccggttgcgacgaggcgcgtcagaagatcgtcgatttcaaagagggcatggcgaacgcgtaggatatcttccgtctatgccagatggttcaatcgtcaacgcggataagggcaatctcctctctgacgcctcgcaggcaggatcgatgcttttgggaggccgctttcgataaggtagaattggcggatacgtgcgtgccttgtttgcggcgagaggagagggatgggagcgggcttcggcaaaacgcgttcgtggacttcgttcggcttcgtagtcctcatccttgtttttcagcgcgcgtacagcttctactcgcagctttcgatggattaccaggtgactttggggcttgcttcggttgcctcctggggcgttatcttcctgctgacggcagcgcgaaaggataaaacgaaggggttcttcgccctttctctcgttttgctcgcagcggccttcgtcgtgcaggaggcgtttctcgttctcatggcggacgggcggcagagcaccgcgctcctttccgcatcgtgcgttctctttgcagcgggctatgcgctttattgccggttgtggattcgagcctacgaaaaaaagtccctggtaaaaactctcgtctgcatttccgccgcttcgggcatatcgacgatcattgcctgcttgccgcctttggcgatgggcttcgatttggttggaagcctttgcgcgttcgccgttcgcctgatcgtgctcggactatcgttttggtgtcttcgcgtcgagttgcagcggccgttcgagtgggttgccgaagaagaggcgaagtcgtcgctcggggaagcctgggatgccataaaactcgttgttatcgctgttctggcggcccgtttcgtgcaaggactgttgttcatggacgaggcggcttacagggaatacggcgcgcaggcgctcctggtcgcctcgccgcttgtttcggggctcgttatcgtgttggcgaaaagattcggatcgtactcgggtttcgtatcggcgttttactggcttttgtccacctgctcgcttgtcgttcttcttgttgtcgcatcggtggtcgatagttcgatcgggtttctctgggttttgcttttcgctgtttactcgcaagtcgatgtcgcgttcctcggtatcctctcctcgctgcgaaaagccctggggtcctcgttttcccaattggtttgcgtgttgtttatctttaaggatctcgtgttcgtgtgcggcagggtcatgcgttcttcaatggaggtccaagtaggaagcttcatatgcgttgtcgtgctgcttgcgacggtgatcgtgatgatcgtcgtctatttgctgcagtcggttaaaagcgcgcacggaaaagactcgtcgccttcgataccggaagcgctttccgcttcgatggcgaagcgctacgatctcaccttgcgggaaacggaggtgcttctcgcgcttctgcagggtcgcagctataccaacatcggatacaagctgttcatttcgaaatcaacggtgaaaacccacgcgaaccatatatacgccaaaatcggcgtcggatcgcgtgacgagttgatcgatctcctgaaccccgagacctatccaagataagggattttcttgtctctaagaagctgttttcccacgtgatacgggtatcaaccctttgagcgatcatgctcggaacagaaatcatccttttgagcaatgcccggcgaatcgccatcggcttattgttttcgcgtcgggatccgattggcgcaagccggcggattccgcaagcgaaaggaattgcacctacgatgagattcaaggaaggggatgtgcaatgagtagcgaaaaaacagggttatcgagaaggagctttttgaagggggctgcttttacggcagcgggaggagcgcttatcgggggcggcctcgtggggtgtgcgccgagcgccgaaaaggctccggctgcagcatctgcgggcagcgccgcggccgatgagccgattgtgatacggcaggctccctcgcagctcaatccgcaggattacgagtatgcgaagggggcttcggatttcgcaacgttgttttcgggagtgaaaatcggttcgcttgacctgtcgaatcgcatggttaaatcggcggcgggttcggacactcagaacaacgaagaggaaatcctttcctactatacgagttttgccaaaggcggcatagatctggtatggatggaagactgcgccgataagttcgagcattttccgaacgcacgggctcaatcgatggacaaaatccccttccagaaaatcgccgacggcattcatgaagagggtgcgttcgtgggatatcagctctcgtgcatgggcatcgttttcagcggaaccaagcaggatgcctcgggcgcctttgcgtctgcggttgctggggatatgacgctcgaggagatccagctgatccaagcggataccgtggcggctgccaagaagctgaaggactacggattcgatgccgttgaaatcaacgcggccggcaacaatatcggtcagtcgttcttttcccgcatgcgcaatcaccgcgaagacgattacggcccgcagtcgttcgaaaaccgctcccgcttcgtgtgcgaaatcatcgaaggcatcaaaaaggagtgcggtgaagacttcgtcgttcaggttctcatcaacggcatcgaagaaaacgatctgaatcttggggacagctcgcttatgacaacggtagaggagaacctggaaatagcgaagctgctcgagaaggccggggcggatagcctgcatgttcgcttggggcctctgggaatgcacgtatgccagttcgcctcggatctgtactttaccggttacggcatagacggcaccactgcatacgggacgcaattcgatttttcccgtcactgggaaggcaagctgatcagcgatcactcaggatgcggcatgatgctcgatgttgcgaaggagttcaaggatgccgtatcgatacccgtcggaaccgttacgtatatggatcctgcgcacgctccggaatacttcgagtcggcgcttgccgacggcaaagttgatttcctgctgatgaatcgtccgcttacggtggatcccgaatatgcgaataagctgaaagaaggaaagctcgacgagattgctccgtgcacccgctgcctgcactgccatttcgactacgacgaagaaggaaaggtgtacgagcactgccgcgtcaacgcgtgcacgcagcgagcgtatcgcgatgggatgcctgagggcttcgatcttcccgaggcatcgtctgccaagaacgtcatggtaatcggggcgggtccggcaggcatggaagctgctcgcatcgcggctttgcgcgggcatgccgtaaccgtttacgagaagaaagacgctgttggaggactgcttgatttcgcgcatgcggtcaaaggaccccatgagaacctcgatgccctccgtgcctaccttgcgcatcagctggaagtgacgggcgtcgacgttgttacagggcagcaggtcgatgccgacttcgttaaggagaagaatcccgatgttgtgatcgtggcgacgggaggtcttcgcgattcgctggggctgtcggagacggcggggacgaagatcgtgcccataaccgactttcttaccgccgacatcggcgacaagatcgttattgcagggtctaacgcccaggccgttgataccgcgctgtacctaatggctcaaggaaagcacgttaccatggtcacgcccgacgggatggacgacgtggacaagggccagtcgaattgggttaagacgttcgcgttgccgatgctttacgctcgcggtatgagggtttggcctcatgcggaaataaagtcagtgggcgatggaagcgtcgtggtgagcggagataccggtgtcgacctcacaatcgagtgcgatacgataatcgaggccatggacatgctccccgattccagcattgcagacgctgtgtcgggattcgaggtctactctgtcggggattgcaacaagccgtggaacatcgccgaagcgatcgcggccggaaaccttgccgcgcgagccgtctaaaagctgctagaccgcctgtaggcgcagaccgctaaaaccaagcggaacgccaagcgggcggcgagcctcaagccggttgaagttcaagaatggttgttaggaggatgcgcatggcgtgcatcctcctgcttgttttctgcgacggcgatagcgaatagacaggttcggagataagccgcaaaccgaagcaaagcttttcctgggtgaagcggcttgacccgatgcattcgggagtggtgcaaccgcaggttgtggcaaggttcggtttctgagataaaccaagtaacgaattagggagtttcttcataaaaacagatctagcgcgaactaaattacgcatagtagacgaggttactatacaatgcttctacatgaataagtgcaggcggcatggagcgcgcggttgcttgcgccttgaagatgggaatgtaacgtgcaggcgtcgtggttggggatcggcttgatggcccttgtggtcatcgggggatcgatcatcgggtttaagcaaagtggaacgagggctcagctccgtgcaacgctctgcgcctttgcgtcgttggccgcgatagttgttctgttctgcgcttttgccattgagggctcgcagcggtgggctgctcccgcgctcgccgtggtatgccttttcgttcccatcgccgtttacttcatcgttcttaaggctgcgcaagcaaagcgcgaatcggtatcgcattcacgcagggatacctcgcgagcacccgcgaaaagcccagctatggttagtccaacgcatcaggcgaatgcatcgggacgcgtgcgatctgctcccatcttccaacaattaggagtcgaggaggagccttcctctcgggctggaatcgattttgtgcaggagcgcagcggagaactggcgaaggcatctttcgacgaggccgatgcaaaagaggcgatcgaggctgtcgacgaagagccggcggcttgcgaggagatggagggcttcggggcggatctgatggaggaaacctgtccgatcgatgtcgagcaatctgttttgccgcagatgggcgatactgcatctgagcctgagcctgagcctgagcctgagcctgagcctgagcctgagcctgagcctgagcctgagcctgagcctgagcctgagcctgagcctgagcctgagcctgagcctgagcctgagcctgagcctgagcctgagcctgagcctacgacgttcgattcctcgagctatttcgccaaggcaacctcgctgcgcgacaagggcttgtttgcggtggcggctaagctgtatgccgaatgcgctgagcttaccaacgatcgggcggtttatcgcaaggcaatgatcgagcagattgcgtgctacgtgaaggcgaaccagcttgagcaggcagtgtgtttggcaaccgaattcagaaacagcgcttcggatctgaccgcaatcgaatcattgaagatcgatgccgtgctgaggatggcggagcgatgagcgggcgccacgtaaaaccgaacgctccgaaggcgactcttcgaaacagcgcgaggaggcctgccgaggaatcggcgggcaacggatcggtgcagccgcaagggaagcggtctgttcgcgggctgagcatgtcgaaggttctcattcccatcaccttggggtgcagcgtgctggttgcctctgtcatggcgttcggaaatcccgtcctctgggtgaccgccgaacagcagatcgcatcccagtacgccgaggggactgatgaagacgatcatcagtttatcgacgaggtggcgggcgaagacggagatacctccgatcttgtctgtcttggtgaatacaacgccgtttcgcaggacgacgatcccaatcgtgcggcgaatatcgagcttgccgcgcagacgctcgacggaatagaaatcaagcccggcgaaacgttctcgttcaacgaaacgcttggcaacacttctgaggacgagcggtatttcgaaacatcggttgtggatggaacaactatcgtgaaagggcgcggcggcggcatctgccaggtgtcgacggcgctctacatcgctgcgctcaaagcggatcttgagatcgtcgagcgctatccccatacgatcgtgagcgattattcgccgatcgggctcgatgctacggtgtcgtacgggcagaaagacctgcgcatcaaaaacaatgccgagacgagcgtatacattcgggtggatgcgctcgggcagacggtcgacgtgaagctgtacggtgcgccgcgtgcggacggcgacgtcatcgatcccacgtcgaggatcatcgagcgattcgacattcccgcctacagggtatacggtgaccccgcttctctcggactcgatcccgaagatcctgtgacgtactacgttgccgagtcgtatcgggtgctgtatcgcgatggcgtcatggtttcgaacgatttgctgtcgaccgatacgtatcaggtttcggtgcagtcgagcgtccaggtggtagagggcggcgtcgaccccgcaaaatagcttgtaccgaatccgtgcggaggcacggtttcgagcgtcgtacataggatgggcttgcgcagtgcgcggctgagaaaggatgcatatggaaacgaacgagtcgatagtaaccaaaggggttgtctccattggcgatcgcaagcagatcggcaccgtgaaaggggtcgtcatcgattgcgacacctgcggggtaagccactacatcgtgtcgagtgcgagcacgaactcgtcgctcgttcttcccttcgaaaaatcggtcgctgtcggcgatacgttcctgaccattcaaacgcgcgacgacttcctttcgacaaccgatcccgcggcgcggacccttgcttgcgaaggctacgatctcgttggcgttacgatgtattcgcgtgcaggcaatcaacttggcacgatcaggggattcgagttcgacaccacgttcggcacggtgacgaagatcgatcttggcgatggcgcgacatttgataaagaggcgttcgtgttcttcgcgcccgagttcgtattcgtcgacgatggcaccaagacggattccgatcttcgcgctgcggcgccaagcgacgccgagggcgagcccgccgccgagaaagagccgcgagaacctgaggcggtcgaagtggtcgaggaggttggggaaaccgaagaagccaaggccgagccgatctctgcggagcccgaagcggcacccaaggcagagccggttgtcgatcaacccgaagaaaccgattccaatgccgagttgaaggcattcctgcttggcaaggtgctcaacgagcgtgtggtgagcacggacggggatttcgtcattgaggcaggcgagaagatcaccgagaaggtacttgatgacgcccagaagagcgatgctcttcttctgcttacgatgagcgtcgacgaataggggtcgaagccaaaaagcgcacatgcgcattcaggtgcgtacgctgggggcgaagctgcagcttcgcccctcgttttgcattggcggcgatggttggcttcgacatgaaatatgggagggcgatacggacgagtttcccatgatttatggctaacggttctttctgcggatcaagtagtttcaagatggcccgatcgagtaagggccatcgggaaacgcgatccaaggaggggtcatgaaaaagagcttatcgcgcagggagttcatcggaggcgcacttgccggagcggcaaccgtcggcgtcgcggggtctttgtccgcctgctcttcgccgtcgagcgctgcgggagcttccgaatcggaagtgaggatggagccgggcaagtatacggcttcgtatgtaggccattggggcatctgggaaacgcctgtcaccgttacggttaacgagacggcgattaccgccatcgaggtgccgaccgatcgaacccagtacggcgacacggaaaagatattcgacgcgtgcagggagcggttgtttcctcgcatcatcgaggcgcagtcgttctcggtcgatgccatctgcggtgcaaccatttcgagcatgggagtgaagcaggccgttcgcgaagcgctcgagcaggcgcttgaggcagggggctcggaccctcgggcaatcgatgcgttcgatgtggttccgccgaaaaccgaagaggggcagacggaagagatgaacgtcgatgtgcttgtcgtgggcctcggttcgttcgggatcgtcgccatgaagcgggcgcgggaagccctcatggaagagaacggcatgatggcttgttcggtatggggtatcgacaaggcgggctatctgggcggccaatcgctgctcacccacgagatgaacgcggtcaaccccccgcatatcttggctgagcgcaacggcgagccgcttgtcgactacgacgactacctcaatacttggtttaccgacacaacgggtgcggacggaacgttgaaatgcaaagaagagatggtccgattcttcttcgacaattccggcgctgccaatcagtggctcgatgtggaccagggctgggaattcggcaccgtcaaagacacgaacgatttctccgaatcgaactacgccgtcgtgttcaattacttctcgaccaacgggatcgacaaatacagcaacagcaacgagaaccgtcgcgccgtgaaagacagctaccacaagaaaatcgtcgctgaaatcgaagccacgggcggtggtgttctccttgaaaccgaaggctacgagcttatatacgatgaggccggcaatgcggtcaagggagtcaaggctcgcaacaatgtaacgggtaaggaatacgtcatcaacgcaaaggcggtaatcatatccacgggcggcttcggcggaagccctgaactgatgagcagcctgctcgatcctcgttgggcaggcagctggaagcagaacggatcgacgcaaaacgacggcaagatgatcaaggccggtctcgatatcggtgccggcacctacaacatcgacatgtcgccgattacgatggagatcgcgctgccccgtttcctcacccatttccccatcaacttcatcgatgggaagatcaccgcgaggaccggaaggcagagtacatggacgtacaacgatatccctctttggatgtgcgtttccatcaattcgtttgccgtcgacaaagagggaaatcgcttcgggaacgaatacgcaatcgcgaacggcataggaaccatgatgcctccgaacgcatggaaggtcggcccgtacttctacagcgtatggtctcaagaccaagtcgatcagcttatgagcgaaggtttcacggcagtgaagaggacggctgcgtattgccagcaaggcggattcgacctcaatgtgccgacgcccgaggtgcaagaggcgctcgacgcgagcatcgatgccggcatcgcgtggaaagcggagaccgtcgaagagcttgcgggggcgatcggtgccgatccggcaacgctttctgcatcggtcgagcgctacaacgagctgtgcgaaaagggcagtgacgatgatttcgggaaggacgccgaatatcttgtacccgtcgggtcggggccttactacgccatcaaggcgatgcccgtcatgtacggaacgggcgggggcttcgacgtcgatacccaattccgcgttctcaaagaagatcatgagactccgatcaacgggttctatgcgatcggtcaggattctttcggcgtgctttgcagcaacgaaatcaactacctcgcatacgggggagtttgccaaggctatggcatgacgtcggggtataccgctgggtacgaggcggggaaatacgcggcggctcaagcgtaaggcttcaaattcgccgtgtggttcaggcgctcgttttgcatgcgtgcaggcgggcgccctgccgcgctttggggcaaaacggggctttcggctcctatggtatacttgccgcaggtggagatcgtcgtattttgtcaatccaggtaaaagggaactcgttgagaacgcgttcaagaatcaccattgcactgggcatgctgttcctgtggccgcttctgcgcactcaggcgaccggcacgcttctcgttgccgcctcgagcgcaatcccctgggcccaaagcagttactatatatttctcatcgtcggagtccttttcgttgcagtggcgcttgcggcgaaaaacgccctgcaacgcgtctacgagcttcgctggccggttgcggttctggcctcggtgaccgcagttgcaaacttcggcgtagcccttgccgtccagatggacgtgctgcatcctctgctgcttgtcgcaagcgtattgttctatgcggtctgcattcccgttctcgtcgttgcgtgggcgttcgtgctggtgcctttgctgaaggccgatttccatgtttcgagcatctgcattgcggcttcctttgtcggcagcttcgtccttgggttcttgcagtacctgccgcagccgtggccgtatctgtttccgattctttgtcctttgctggctggttggtgctggtttctggttcccaaatccgacgctcggcactcggcggcttccatggatctgccgaccgtgctcaggtcgcttcctctcggatcgctggcaagcctcgttataacgatgtttctcagctgctttctcgtcggcatcgcccgttccggttcgattgccatatccgagaacatcgatctctactatgcgaaagattttgccaccatcgttgttacgaccatcatcgccttcatgctgtacgctttgcttgcgtcgaagcgatcgacgcgagtgatttggattttcatctttacggtgctttgcatcgggcagcttatcatattggccttcgatgacggcgtgttcgccttggttgggataggagtttcctctgctgcccgcgcgagcttttcgttctttttatacttctacctgcttaccttggtttacgaagagaacctgcccgtgattcccgtgttcgtttcggtgttcgtatcgacgaatatcgtgtccgatgctctgtcgtttgcggtggtccctgtgttttcgggtgcgctcggcgttgattacgccggcctcatcaggccggcttcccttgcggtcggaatcatcgtgtttttgtgcctcgcgtttttctcaggatcgatggcattgagctatccgcgaggcgagcgggcgcatggtttcgaaggagcggcgtcgaaccagctgcagcgtcaggtggacgagttgacgagccgctacggcgtgagcgagagggagagcgaagtcatgctctacatcgttcaggggtacagctacaaggcgacggcctctgagttgggaataaccgagggaacggtgcaatcgcacatcaagcggctgtacgtgaagctcgacgtacattcgcgccaagagctcatcgaaacggtcagatcggttgacgcctgacgcctggccgtctcggttcgagccttcttccgttcgggaaagcgccgccataggctgttgggtcgagcgcccttgcactgggcaggaaccaggcgccttagcctaatcgccgaattcgaagagatcttcgaggaagctccccttgcgtttcttcttgcccttcttgtagtaatcgtcgtcgtgtctgcgatcatcgtagcgcttttcttcgtagtgcggttcgtagcgctggggctggggtgcagcttgtgctgcgggaatgttttccgcagatcgctcgatgatcttatcgagctctccccggtcgagccaaactcctcggcattgcgggcaatagtcgatttcgatgccctgccgctcgctcatgaccaagtcgatgttgcataagggacatttcacggaaaccacctgctttcgtgtcgggcgcgattcgctcggattatgacggcgtgcggcttaccgagccgacgcattgcgcggctcatcgaaaaacgcatctgcggtacaatgggcgaatcgaatcctggacggctcgattcgggcgctcgcacccgcaacatgccgtcttcccgatcaagacgaagcaggcgagattatgcagaagcaactactgatgggcaacgaggcgttcgcccatgccgcgctcaaggcgggcgttcgcgtggcggcgggatatcccggaaccccctcttccgaagtcatcgagacgatcgccgccgaacacgcggcagggcgcgcgcaaggcatccatgttgagtggtcaaccaacgagaaggcggcgctcgagctgttggcgggagcggcttatgcaggggcgagaacgctgttcacctgcaaacaggtgggtctcaacgttgcgagcgatgcgcttatgagcctgaactacgtcggcatcaaaggcggcaccgtgctgttcgtcgctgacgatccgggtcccatctcttctcaaaccgaacaggatacgcgcaggttcggggcttttgccaaggtgccggtgctcgatcccgcaacccccgatcagggatgcgagatgatagaggccgcctacgagctgtcggaggcttaccgcacgccggttatcgtgcggccgacgacgcgcgtttgccacgcatcgaccttccttgaatttcccgacgtgacgatcgcgcgcgatattcccgaagaggggtttgtccgcgattccaaatgggtcattttcccgaaacgcgcattcgaggcgcatggggaaatcaacgagcgtttgaagcaaattgccgaggacgcctcaacgggggcgctcgcagtgttcaacccgattgaggtgggtggaacgaccgagcggggcgagactccgcaactcggtatcgtggcgggcggcgtgagcacgatgtacgtgcgcgaggctttgcgcatcctcgccgaacgctgccatgcggccggcgtcgatatgcccgcataccggttcatgcagatcggcatgccgtttccttttcccgagcatgctgcgcaggattttgccggcgggctcgatcagatcatcgtgttcgaagagctcgaccatgtgatcgaagatgcgttgctggcgatgtgcggcaagctgcatgcgggctacgaagtgctcggaaagctgaacgactatacgcgcgacaggggagagaacaccgtcgacgacgctctcgaacgcctcgcaaagtatttgggcatcgagcaggtcctcggtgccgcatccgcccgcccctcgggcgacgatgtttcacgtgaaacatctgttcgtgtttcagacgattcaacgactccgctctcttacgacggagtgcttcccgtgcgcccgcccgtgctgtgcgcgggctgtccccatcggggaagcttctacgcgatcaagcgcgcgctcggcaagacgcctgcagtgctgtgcggcgatatcggctgctatacgcttggaaacgcgatgccgctcgatgccgtcgacacgtgtttgtgcatgggggcgggcatcacgatggcgcagggattctccgttgtcgagccgcaaaagaaaaccgtggcgttcgtgggggattcgactttcttcgcttcgggccttacgggcatcgtgaacgccgtgtacaaccagcacgacatcacggttgccgtgctcgacaacgcgactacggcaatgaccggatcgcagccccacccaggtacgggagtcaccctcatgggtccgaagagccaacctgtttccatcgaatccgtgctcaaggcggtcggcttcaagtgcatcgtccatgcgaatccgtttgtcttcgaggaaagcgcggcggctgcaaaagaggcgatcgagttcgaaggcccttcggcgatcatctacgaagggccgtgcatctcgctttccaagcctggggagcccgtgtccatcgatgtgggcgcctgcacgggctgcaagcggtgcatcaccgaaatcgggtgtcccggcataggcttcgacgcatcgcttcgcggtccggcgagcggcgggcggggccaggcgttcatcgatcggagcctgtgcaacgggtgcgggctgtgcacgcagatctgcccgttcgatgcgattctgcttcccgggcaacgaccagatggcgccgaggagcgcggggaaggagcttcccatgcttaacatactgcttgccggggtgggcggacaaggtacggtgctcgcggcgaagctgcttgcgcaggccgccgaggaaaagggctggcaggttcgcactgcggaaaccatcggcatggcacagcgcggcggcaacgtggtctcccatgttcgcatgggcgatcggggcgaggaggtctacgcgccgctcatcgctttgggcgcggccgatctggtggttgcgttcgagccggccgaagccgcgcgcgtgctgccgtatctcaagccggccggtgcgatggtgtgcgcatcgaccgctatacagccagtgtcggctgcactttcgaacacgccctaccttgcaggcgaggtgctggaaaaccttgcccgcataatcggggagacgggtggaaccttcgttgcggtcgacgacgccgcgcttgtggaaagcgcgggtagccgcaaagcgctcaacgtgatgcttctcgcgtgcgctttgtccgaaagcggtttgccgatctcggtggacgatctcaaacgcgccatccctgcctgcgtgaaagagcgcttcgtcgacatgaacttgcgcgcgatagacagcgctacaaggtagtgctgccctatggctgctctatacatgaatcatcttggtcaatctgttctgaacgtgggtgcttgcggtaatatttttgatattggacgagctttgtgcgacgcaaaacggatgcgctatgattcacgagaagtgctgattgattgggcaacaacaaggtttgtcggggtgtctgtgttgacgacggttacggcactgcaaatgaggatcggcacgttcggaaacaacgtgtacgtaaatgcaccaagcaaagggtgcgacgtggatggctatattagccgaatggattactttagcaacatcggtattgatcatcctgacttctttgtcagacatgatgcgggtcaacggtttattccgattaccagattcgataaagaggcaaataggagcatattgcccgataagatgaacgaagcgattgttgctcacgtgccagttcaggcagcgctgaagagcggaatcaatttcgcatttggcgaggcattcgacaacgtgtgcgttcattcccgctccgtagtggggggatttgctgcggcgcagtattatccgaaaaagcaaatccttgaactgtgcattgctgacggtggttgtggaataccggaatcactcaggagaaatgcggaatacgcgatgttgaatgacgacgagttgctttgcaggtcattggaattcggtgttggcgaaaacacaactggaatatacgatgatcatggctttgggtgcgggaagggccttgcatgcatagcgaatattgtcaaaaaatcatgtgggagtatggaaatagtatctgggaatgccgctttgaaggttgatgggtcgggagttcatacgatcgagggatgttgctttcccggaacggcgatcggcattgtgttctcaaccgatggaagccatgaaatttcagaagaggatttgtttgttggaatggagaatagtacgctcttgaaagaccttgtggaagactatcgttccgttgatggaatagacgaaaacggcagcgctttgctttggtaaggtttgcttctgtggtgatgggcgggatcccttgtgttgttgccttagaaaaaggtagtatataaaagctaccattattatgcattcgggttaaataatggtgatcggaggtgtaatcgtggtctttcaaatgaagaaattcggaacggtcttaagcacacgaagtctcggcaaacaagtttatacctcgttgtacgaagatattctgcattgcgatgagttgctgattcttgatttcgatggaatcgatgcggttaccaattcatttgccgatgaggtttttgggcggcttgcggtacggattggtttgagcgagctgcagaggcgtacaacgtttcggaacattgatcgcgtatcggcaatgtgcgttcgcgttgctatcgatgcgcgaaacaaagaactgacggcctgtcggtgagtgcgccctcgcattgtaggcggtagaaaccctgcattttgttcgcagggtttttgttttgggtgacgatgtaggatggcctgcttcaatttcatgcatttttgtcatatcactgattcgatctcgcggtaaatcagtggtaatcgtgtcgtcgttttcgaatacgtcatctgttcgcaggctcgattaagcggttccgaatgaattaactgttatgtctgcgcgcgatagacggcgcagcacgcgcctgaacccgatcatttctgtactatactgaattgatgattgaaatagtcatcaattgtgtcaatgcaaaaggcggctttgttcgctgaagcgcatgcgtgcgcgtactgtcaagacgggcgggagcgggtggcggtatgccgatagtcgaagatcgggcttttcaggacgaagcgatcgagctgacgcgcgagctttggcgcgcatacctcatcaatcgatccgacgagggagaccaggtcatcgcgcgtgttctcgatatcgagaatctttccgttatcggaacgggtcgtcacgagttctgctcgacggcagagcagtttttcgaaaacctgacgaacgaccgttccgaagcgggcgatgtcgtattcgatattctggacgaatattacgaagcgcgcgtgatcgatcctggcgtgtgccttgttttcggcacgctctgggtgcgcgagcgtccgagtgaaccgaagctgctgcttgtggagatggatacgcgcttcagcattctgtatcgcagagtcggaaatgcgttgaagcttgtccatctccaccattcgacgccgaacctcgaccagaggatcaacgagttttatcccaagactgcaaccgaacgggccaacgcggcgctcgagtattccaaagagctcgaacgacgtgccgatcttgattcgatgaccagcctttacaaccgcatggcttttgagcggctggttgacgagcggcttgcgcggggcgcttccagcgctgtattctgcatgatcgatctcgatgatttcaaggcggtcaacgatacgctcggccatctggcgggcgatcgcgtcatcatcgatttcgccgatgccctccgcggcgccttccgggatgattcgatcatcgggcgcgtgggcggcgatgaattcgcagtgatgctgtgcgatagggcaagcgcttccaatgccgagcggcttgcgacgcggcttatcgaagcgtgggcggaacacggttcggatcagccgatcccgttcagctgctcgatcggcatggcgaaagtgggcggcttcggcgatttccaagagctgtaccgcgctgccgacgaggcgctgtacgcaagcaagcgaaacggaaaagggcgatggtcctggtacggctaggggatatcctgccaagatggaaaatccccccgcagcaccatacgctcttgtgatagagttaacccattatgaacatgactccagaacaattcacgctcgtcaaagagcagttcaaaacgctgaaagagcgttctgacttctatgcccgcaaattcgagggcatcgatcttggggatgtgcagacccaggaagattttgagaagctgccgttttccgaaaaggacgatctgcgaagcgcctacccgcttggcttgcaggccgtgcccgacgaggagatcgtgcgcatccattcttcgagcggcaccacgggaacgcccgtcatcattccctacacccagcaggatgttaccgattgggccatccagttcgctcgctgctacgaaatggctggcatcacgaacaaggaccgcatccagatcacgccgggatacggattgtggacggcgggcatcggcttccagcttggggccgagcgcctcggcgccatggccattcccatgggtccgggcaacaccgacaagcagcttcagatgatgcaggatcttaagagcacggtcatcacggctacgagttcgtatgctctgctgttggcagaggagatcggcaagcgcaacctgcgcgataagatctgcctgcgcaagggcgttatcgggtcggaacgctggggcgataagatgcgccatcgcatcgccaacgagcttggcgtggagatttacgacatctacgggcttaccgaagtgtacggcccgggcatcggcatttcgtgcgatgagcatcacggcatgcatatctggtccgattatatctacatcgaagtggtcgatcccgatacgggtgttccgctccccgatggtgaagtgggcgagctcgtgctgaccacgctgcgcaagcagggtgcaccgctcatccgctaccgcacgcacgatctcacgcggatcattcccggcgattgcgcctgcggctctgcgcatccccgcatcgacacgctcgtcggccgcaccgacgacatggtgaaggtgaagggctgcaacatgttccccgcccagatcgaggaagtcatcaagatcaccgacggcgcctcttccgaatatcaagtgatgatcgagaacatcagcggaaaagacatcctgacggtgttgttcgagacggagctcgaaggcgaagcgaaggagcgttgcgaagaagagctctcgatgatcttcaaggcgaagatcggttgcacgcccgatgcgaagggcgttcccatgggggagctaccccgttctgaaaagaagaccaagcgcattttcgatagccggtactgacgtatccgttagacatgcgagcaaagacgaaccccgacgttacaaacgagcgacgtcggggttttatgcatggggcgcttgcatgaggcaatgagggccaggccgcgatactcccaagccgattcggctatcttcacctggatcaagattctcgatggctgcgcctgatttggcatggttcggatggactcgccttgcgtctgcggtaaccgagccggctgttggtctgctgggcgcgaatcgtcatcggccctgaactgcgatagcgttatagctgtagtgttggcttcgaacgcaaatgtggtctaggttgacaatttgccgaaggcatttggttgcaatgcgtacaagagcaatcgcccgaattcaatcttagctagttctcaaagccgtacactgagtagtatttattgattgtcattaattactgaattacaattatttatatcgtagttattgagcctcacgggtgttcggtgcggaagaaagggcgtactgagggtgcctgcgagggccctcgtctccgaggcggcgcgcaaatcgcagatcgccagcagaggcgcggcggagaaagcggatgcggcgcaatatcgtcggcgggccgatggcgcgcatgccgcgaaggcgaacgctggcgaggcgaccgagatcctcgactccgatgtcgaacaggcgatttccagatcagggcgagccggcgatatccgatcgatgagcgatggcgccgtgtcttcgatcccggaagatgagtatctcgagctctatcgagcggccagggaaggcgccggcgtcaagctccccgtgtatgcagaagacggccccaccgtcatcggcgagttcatcgtcgacgtgctgtaatggcgatcgccgagcagcagtcgcgccgtatcggcctgcagccgtctttcttatcgcgttatttggctttgcctcaaacaggcgctgcctgcacctggcgatcctcgcgaatgccatactgaaggagtggaggtcgttgaatagtcttatcgtctgtataaatagcaacctatgaatcaaatatgagctggggtttcgctttcgactttgcgccatgaaggccattaccaattgccttttgaaagattgatagcgacgctgctgcttcgcattcggatgaagcgtagccgtcgaatagaaaaaataacgatcgagggaacatttgcgcttctattagttaattagatataaagatgaaatatctaggaggttcgttggattgttccaacaggacacggttactcgaatatgctcttacgctttttaataaggccatatatcgctacgtctttagcattctgagatcgcgaagcgaagccgacgacgttacccaagacgtattcgttgggttgtatctttccgaaaccaacttcgaggacgactaccatctgaaatgctggctctacaaggtcgctttctacaaatgcaacaacgccattcgggatagacgacgcaaaaaagagctgctgttcgatccgatggaagaaaacaccactgccgtcttggagaacgggcttgctgccgaggatgagcttgcctacgtatgggaagccgtggacgctttatcgcctgatcttcgaagcactgtctatctttattacatcgaaggctattcgaccaaagagatagcttctataaacggagtttcttcagctactgtgaggacgcggcttttccgcgcacgcaaatcgctcagggggatcgtagggggaattcgatgatgaatcgtttctgggatgattacagaaaagctatccggcagatagagccgaatgattgctttgtcgatagagttcttgagcgggcgaagagagcgaaaccgaccacaacccgccgttttcacaaccgagcctcgtgcccgaaacgtttcctgctcgctgcgtgtctcatccttatagcaggcgttgggctcgttgccgagttgggacgttcagaagggctttacgctttcgcggctccccttcgcctcgaaaaccctttcatttcgatcgacttaggcaagcgcggatcggtggaggtgctagaggatggatcaagtgctgctgttgcattcgatatagggtttgattgcagcgcttcagataggggatccgtcacgttcgctagcagcaatcgttccgtcgcaatcgggaaggggttttctgatcttgatgcctgctcgttatccctgaccgttggcgacggagattcgactcaaggggtgatcagggttgttgttgatgctggagtcgatctcgatcgagccctttacgacgaaatgaggtcggacgttgtttacgccgacctggttcttcgttgtctcgacaagctttccgaaacggagatagtcgtttcggccgacaacttcgagtctgctacgtacggattttccgttaccgacgatacgcgcggggagctacctgctgtgctggctaggggagggagcctgttgataggcatggaattgtcaacggatcaggaataaggaggaaaaatggggttcaatttgaaaaagacgataacggcggtttctgtcattttggccttgatgttcgttgctgtgccgcaagcgctggcgaccacctggggcgtacaacagcacaggagcatctcgggcgtgagctactactaccaggcaggggttgatggaggcctttcacctcgcgcatactcttcgatatcggcttcgaagaacgtggggtcaagcaacctcgcaacccaggcccaactgtacaacggcgctggctttctgctggcttcgagcggatggaactacggcaatggcagctcggcgaatgccagcgtcggggtgtcgcaggcgggaaccgggtatatagggaagggatattctctcacgaagtatggcggcaccaattatctctacaactctcctacagcggttgtgtacagctatgagccctattcggttaacgaaaggaatatgacttacggttccctggcgtggtgcacgagcccgaaggacgcaccggatcttgtcgcggtgataagcgacgacgggacagaggggtacgcttactacgaggacgtcttcacggggggttattccggagagagctttgccgtatacgacgatgacggggcgaccattgtcgggagattcaccgtaggagaccgcaatatgttgagtgcgggaacattttgagactcgcgggataatagaagacagagacagggagaaggttacgggttattcgatgtttgatccggtctttcctggaagccggaaaacgctatgaaaggagagatgcctatgaaagctttctgtcgtggagctgttggaactcaagctacgagggtttttctgtctaccttgcttctttgctcgatagcattggttacggcatgtggagacatggcggccgaaggcgaggaagccatgcgtcagacgggaattgaggcaacgtcggctccgaaatatgatgtaaacgaatacggagagacgtacggatccgcgcctgagctggcaggttttgtaggggattctcgcgattattacgatctgtttcccgatcttatcctcagcgaagccgaagacggtacggtggggtacacgcggaaaagcgacatcatgtcacccgaatccccttcttcgccagaagatgctttgaaaatgcaagaagagacgaagggaaaaacctgtgaggttcccgtttatggagtagatgggagaacggcaataggttttttgatcaacagcaaggagtgagcatgaaaacaagaaaaaggatttactctaaagcgctggctgcggccttactgtcgttggcgcttgtagccgccctgcctttgacggctaacgcgacgacggggccgagctcgggtgcgacggtcaacggaatctattactcgggcttcgctacgtgtaacaactccggaaacaacgtgaagggcgcggtcaccgtttcggcaagcaaatctgttcccgccggatatatgggagcctatttacgcgtttttcgtggaggagctcaaatatcctacaaaggaaccaattacagcaccgttgccacttcttcctttgctgtctcgacctatgtcaatgggtcttctggtacatattatgcaaacggttctttgagtgcatacgattcatctaccggtcattacaaagtagttaccgtgctcaacacccccaacctgcaacgtgccttagagccggcgttctcggctaccgaatatcccttgaaccagaaggggcttgaatatgggtctgctctttccgctgagtctataggccatgagcccgatctcgtatacacggtcgcaacaaacggaaagtacggttatgtttataggtccgatatggagttgcccgagccaagcagcccaaccgaggcgatcgatattgcgcaaaacccctacgttaagaaaatccccgtgtattgtgtcgatggagcgacgctagtgggaaccttcgagatatccgtaggagacgaagtggacgtactgagctgatgctatcgaagcaagccaatcctagctcgattgcatagacgcaaagggaagggaagccgatttttatggacttctcttccctattcttttggttcttgaagctttcggcagcatgtcggaaaatcaatcgcagccgccctcgggatactggactatgctgggttttcgtttgctatcgtgattttctgttccttgtcggatcggaataatttacgggtcctatttgacgttgctttcaacgaagaccaggagactttcgtacccgaggtatccttcggccatgccagtgctgcgttgtagagcttggctcggaacgctgtccgtgcttttgcatgaaggatacgagcaggatgagcggccgacccgtcctcgtggttgggcagatgacggcgatcaggccgaccctgacgatttcgggatttcgcccgacgcgtttgcggcaaaggctcgtttctgctttacagcgctttctcctctgactcgtcgcgcattgcggccagcgaatcgacgttcgcctgctcgtattcgttgaactgcgacgggagggcgtcgtactcctcgggggagtagagctttcggtaccagctgcaggagtcgaaataatcctggagttcttggtcggagaagcttcttccgtgtcgggcgtagatctcgtttatggcgatgtatcgctcctgttcggtcagcgcttcgagctcatctgccgagtagactcgggcgtcgctttcgggaagcacgtattccgactcggccgcagggcctctctcggtgaaggggagggcttcgccgaaatctcccgtcatcgacagaaacagaaggtacgcggtgacggctgccgccgccgcgacgaggacgagcttcgctacgtgccctttggggatcgatgctattcgggagggtctgctgcgtttgccgtccatgttacacctcgattctcggcggcgggaagtccggcggatagaatcgtctgaggtcgtcccatgtgagcttccagctcgaatagggaatctctcccggctgcccggtttccgtgttttttcttgcggtcatggcgagcaaccttttcccgtcgattagctcgacgccgacttttcttgcgtattcgcgggcttccggagtgtagtcgctcgtcgtgacgaacaccatgcgatccgcatggcgcaaggcgttcgcgccgacgagcttctgaatcgtatctcgccccactttgttcgcgggtccgtagcatttgcattcgacgatggcactttttccatcgggtgagaccatctcgatgtcgtatcccccgtcgcgggtgcgggatgtcgtgtttgcttcgtagccttcggatctaaagagcaatgcgcagtactcttcgaaatcggtgggcgtttcctggaaagctcccacgatgcttgccagcgatgtcttggcggcgagcatcttcgcattcttcgtcgccaaggcgtatttggcgtgctcttccgggcacatgcaaatggaagcccctttgcccctgaggacgttgacgagccatacgaggtgcacggggcttgccgagaagacggagaaatcatcgatgtccagctgacatcttccggtgccgatggggttgaagttccagcgtttgttgcggcttccgtctttgttggggtgcgcccaggacgggaactcgagcctgaagcagttggggccagaggagtttcttctttttaccagcgtgttccgatcgagggctatgcggtacgtttcacggaacaggttgcgcatgtattccgcccgcgctgacttcagcagcgagacgaacgataaaagcaaagcgacgagaatggcgaagagaatcaaagatgccggcgttaccgacagcgtttcgaatccgatcagttcttttcccagcatgtctgacatgcggcggcgccctccttttcccatcatgcccgatgtgcggctttcgatgcatcgggcatagagcacatcgtctgaacaattatactaaagcaaggagtgaggggaagcctttctgcctgctgctgcctggcctgatgcagggatcgaaccgtccgagccttctctgtccttggatgattgcgccgtcgttctttttcgagcataatatagtcaacgagaatcgtgccctttcgcggcacgcattgccttgcaggcgccctgggcgaaaagtccggtggacggggcctgcgatcagacatcatacatacgccagcgccgtttcggcgggtcgcttcgcgtttccttcaatgcgggcgcccgaagcgacgcgcacggaggcacgaaggaggaacgccatgggctggaaagacgagatgagagaatgcgcgaggactctcgaggatttgggcgatcgcctgcagcttgacgaaggtgcgcgttcgaggatgtcggaaatcctcgaacgcgcacccatggctgtgccgccgtactatctgtccctcattgatttcgatgatcccgaagatcccatcggcaggctcgccatcccgtcgttgcgcgaggaagaccaatcgggcagcctcgacacgtcgggcgaggcggacaacacggttgccgtcgggattcagcacaagtaccgcgagaccgttttgatgctttccaccaacgaatgcgccatgtactgcaggcactgctttcgcaagcggctcgtcggccttcccgatgagggaaccgcccgcgacctcgaggcgatcgaagcgtatctgctcgagcacgacgaggtcacgaacgtgctcgtgagcggtggagacgcccttatgtgccccaacgaacgaatcgattccatcctggggatgctcgccggcatcccgcatctcgacttcatccgcatcgcaacgcgcgtgcccgttacgctgccgtcccgcataacgaccgacggcgaactgcgcagcatcctcgagaggcgtcgggcggagaagcagatcttcatggttacccagttcgaccatccgcgcgaggtcacgcccgaggcggccgaggccgtcggagcggttcttggcctcggcattcccgtgcgcaaccaaacggtgctcctgcgcggcgtcaacgacgatgccgaggtgctcgggagcctgtttcggaagctgacgtccatcggtgccgaaccgtactacgtgttccaatgtcgcccagtgtcgggcgtaaaaagccagttccaggttcccctgagagagggttgccgcatcgtcgagggtgcgaaggcgctgcagaacggcgtggggaagtcgtttcggtactgcatgtcgcacgtgacgggcaagatcgagatactcggcgagctggacggaggccgaatggcgttcaggtaccacgaggcgaaggatcgcgccgatcttggccgcctgctcgtccgcgaggtttccgacgaccaggcgtggttcgattagccgctcgagggcggttcggcgctgaagcaaggccttgggccgcgtgcagtgggctcgcctgcccgatctgcgcggcgaggtgtttcggaacgctcgaaacacctcgctattgtttcgagttctcgttatagggagaaatccgccacggcgctgagcgctgccgtgtagccgaacgtgcaaccgcgatgcaggtttccgccgtagtacgaggccgacggacgcacgatgttgtagttgccggccgtctcgcctgccgcgtacaagccgacgatgggctgattgtcgccgtctacaacgcgagcgcaatcgtcgatgacgaggccgccgtaggtgtttttgacgttggggatcgtttcgaagatatagaaggggccctcctcgagcgcgatcagcgaatcttctccttttccgaagtcttcgtcgatgcccgtcgcgcagaacccgttgtaccgctttatctgctcggcgaccacctttggatcgagtcctgctttctcggcggcttcttcgacggtttctcctttgaagacgacctccccctgttcagccatgcgctcgagttcttcgttgttgctgtcggtcacgtacgtggcgtagttgccgtagtagaggatgtcgtcgctttccaggatggccttattggcaacgcagtagacggtgttctcgtccgtgtcgaagtatgcgcgcgccgcattcgacccctctttccaaaagcgaacgccgtcggtgttcagccagaccatgcctggcgtgttgtgcttgatctccctcatgacgctttggccgttgccctcgagaaccggcagggtgccgccgtcggtgcggcagaagtccatatcgtgcagtactgcgccgatcttgaccgcggcatcgaacatgtttccgatggatgaggggctgcccgaacgcgcccagcgggcgtagagctgagagagcatttcctcgttggcgcaatatccgccgcacgacaggatcgtggcgggcgcgctgaactcttcgccggcttcggtgcgcacgcctgtcacctctcttgcgtcgttcgtgacgagctcggtcgctttggtgttgagcagatagaccatttgacccttgtcgacgaattcttggatgctggcggcggtatcttcgaagatgctcaggcctcgctgctcatgggaaatcacatacgccgcaaagtaatcaacctcttcggtcgcattgccggtggatgctgcattggcgtgcgccccgacaccgtctccgatcggtccgccttcaatccattcggcgccgtatttcgtgagcatgtccaaggcagggccgctgttgtacgctgccacgtatgagagctcgggtcgaaacgtagattcgtcgccgtccaaaaaccatgcgtacaactcgtcggggttcgtttcgtagccgtacttcggcagcgtttcgccacccgcggctgcgcaatagccaccgctgtacatggtcgagccgccgaagtgactgttgtgatccagaacgaggactttggctcctcggtcggcggcggtgagcgcagcggtgattcccgtgatgccggctccgaccacgatgacatcgggatcgaaatccgcgatgtcaccggaggcgttcgccggcgcggaggtcgtggcatcttcgctgaacatcttcttgtttgcgcccgcctgcgtgagcgcgtcgcggatcgcttccttcatggtggttgtggtgatcgtggcgccggtgatgctgtcgacctccgttgtttggtgcttcacgacatttgcggcgatcgtgctttgggctcgctgtcccatatacatggattcgtgggtgctcgcgatgcgtacgtcaaggatggcttcttcggaaacatcgacttcgatggtgtacggaccgtaaagtccttcgaccgaggcgctgtaggttcctggcgtcatcttggcttcagtaggttttgtgctgggcggcgtacagccgctcatcagactcagtgcgagtattcctgctcctgcgacgaagtgtcggcggcttagagagccggctttgaaggcgttgctggtcatgttttcctcctcatgtagggaagacccttgtgctctttgcgtcttccgcgtttcgtacagtgcgccccggcgggggcttggcaacgtgcattatgtgtgtgttgctccgcctctcgcatcgggcaaataacagcaaatgccgagatggttgtgatatcatgcactttgtccgatgcagcatcgagagggttggatagatgtcgaaggcccggaaggcttctttgatggcgcttgcggcgctcgtgcttgtaggtatttgggtcgacataaccgggtacctcgatgtgttctcgagtccttcggctacgagccattcgcaggagatcgctcactacgcgtgctatgcgggccgcatcgcgatggccgccgccttccttttgttcccccgccagctcaactgtccgatcgagcgctccgtcccccttatgctttgctgcatggttggcggcacgatgctgtattcgttcgggttccatcaatctttgttcgaccctcagtttgtggcggcagcaggatcggcgctcatcggcgtggggcatatctggatcgtttcctccatctatctttacctgatgggtgtatgtgggaagcgcgaggctctttatgtgcttgtggcggcgcaaattgccgagcgcattctcgttgaagtgctcaattctctgctgacggatgcgtcccttatcgtctgatcgtatctgctgcccattgcaaccgcctgcgttcttgccgtttcgaaccgcatgctcgtgcgctatcgcatagtccgcgacgaaaaacccgatgccgaccaacgggggtcggttcgggcgtacttcgtcactctgtgcgtaatgtgcggtatcggccttgtagcatgcggagcgatgagcacggtgggcatatggggcaaagcgggtacgggacagtttgcgggcgagggggagcagctcgtaacggcgctcgtcgaatgcctgatcgtggtgctttgctgccgtgcgacattcatcgcgtcatgcgaaaagcctttggctctgcgatatcagagctctcttcttgtgctggttaccgggtttgtgctgatgtcgtcgcgccaattgctggttcccgtgcccgaggagcttgtaaactctctgcttgtggcgatcgaaaactacgcgcatatactgttctgggttgtcgcgctcgatgcggcacgctcgctcggttggccggcctaccgctctttcggcgtcggattggtgtcttgcagcgtgacgggtcttgcatggagctttttcctggagcatcatgtgattgcggccgagtctgccgtattcgtggtgttctatcttctccttgtcgtctgcatcgtttatcctcaggtgttcaaccgagtcaacatgcgctcgtccagcgatgagggtgcgatcaacgaattcgcccttcagggcgagcaacggttggacgcgggcgtgaacgggagagcgctgaagcttgctctcgaacagcggtgcgcccacgtggcggaggactacggactctctgctcgggagggggaggtactcgttcttctcgtaaaaggggacacgcggcaaaacatgtgcaagacgttgcagttgtcggaggggacagtcaagacccacctgacccatatctatgacaagctgaacatccattcgcgtaccgaactgctcgaaatagtctacgatgcggaggcgggaagggggtagagattatccctatgccctgcgagggacgctgcggtacgctttcgtcggtctcttcctcccgtcggagaatacgagcgtgacgagcggatccgtattgatcatggagcacctgagggcggcctgctctgtgcttagcgaaagtccgggcggtgggatcggggtcgacgtggcggtgttgacgatgcgggcatccacaagccggttaatcgcgaattttaaaagccggatggcgaccatgcgcggatctgccgactggtctaagttgtgtatccgaatttgttaacagggatcagccggatcacgtttttcagttaacgtagtttaacgatgcgataagaaagacggctgcaggccgatacggcgccatcgctcatcgatcggatatcgccggctcgctctgtatgtggtccgctcggttcgtgcgcgaaattctcaaacggtttgcgctttattgtgataaagtaagcgacgtgctatcgacagcggaacatatcaccttcgcttcggcggtctcgcaggccgtcgcttccccttatgcacagacttcgtactattactattattcctatcgatacctgtagcacatgggtttgcctcgtgatgctgcggtcgtaggttcattccctgcgccgaaccgcgcatccgcacagagcaaaggcaaaatcatgtgcgcctctcagtccgagtacgtatcgaatcgataggaaaccccatgatcgaaaaagtgttaatggtcctcatattcgtcggcgtcgcggtgggcgtcggcatctattgccgaaagcatacgtcgagcgtcgacggattcattctcggcggccgcaacgtgggtccgtggctctctgcgtttgctttcggaacgagctatttctcggcggttatcttcgtcggatatgccgggcagttcggctggaagtacggtatcgcagccgtatggattggcatcggcaacgccatcctcggcagcctgcttgcctggtgggtgctcggtccgcgaacgcgtgaggtgacgcatcggcttaaggcctccacgatgccggaattcttcggcgagcgtttcaagagcaagggtctgcgcatcgcatcggccgccattatcttcgtgtttctcattccgtacaccgcaagcgtctacaacggtctttcgcgtttgttcggtatggcattcgggctgccctacgaggtatgcgtgatcggaatggcagttgtcacctgcgtgtatgtggtgcttggcgggtacatggcaacggttgtgaacgatttcatccaaggtatcgtgatgctgttcggcatcgttgcggttatcgttgcggtgcttgtgaacaacggcggctttaccgaggccatcaaccagctctcgttcatacctgcagaaacatccgagatggcaggtcccttcgtcagcttgttcggacccgaccttttcaacctgatcggcgtcatcattctcacgagcctgggaacgtggggtctgccccagatggtgcagaagttctacgcgatcaagagcggacccgccatcaagcagggtgcgatcatctccactgtgttcgcgatgatcgtggcgggcggcagctacttcctcggcgggttcggacgtctgtatggcgatcaggtcgagatgaccgcggcgggtacgccggtgtacgacagcatcattcccaccatgctttccacgctgcccgatttgctcatcggcatcgtgatcgtgctcgtgctctcggcttcgatgtcgacgctttcctcgctcgtgctcacctcgtcctcgacgctcacgctcgacctcatcaaagacaatatcgtgaaagatatgagcgaaaagaagcagcttctgtacatgcgcgtgctgctcgtggtgttcgtggtggtgtcggcggttatggctcttgtgcagtacaattcgtcgattacgtttatcgctcagctcatgtctatatcctggggcgctctcgccggctcgtttctcggcccgtttttctgggggctgtattcgggacgcatctcgaaggcggctgtgtgggcgagcttcattgtgggcgtggggctgaccacgggcaacatgattgcgggttttgttggtacgccgttcatcgaatcccctatcaactgcggggcccttgccatggttctttcgctcgtcatcgtgccgctcgtgagccttgtcacgccgaaggttcccttcgaagttgatccgccgcacccggagggtgcgatcgaccgcgaatacgtgcacgaaatcgaggactaaggtttgcggcagcgcttcggaggcgtttgcgtgcgtaatgctatcgagagtcgtccggtcccatgccgaccgtttcggctttcgaagctttgcggctcaagcgagacttcaaagcgctgctcggcatgttccgcacaagccgccaccttctcgaatggccgaaattgcggggtttctccttcttgttgcgggtcatccccgctatactgattcgcattgaactgcgtggtttgcgaaaaccgttctatgtttcggatggcatagcctggctgttgcggcacgatgggcaggggcacccgaaagggagatcgggattgtggatcgcgatttggtaccgtatcgattaaggggaatcatatggaaggctttgaccttatcagcactggtatatggtcgatcattccacctatcctggctttaggcctcgcgctcatcaccaaagaagtgtattcttcgctggcgatcggcgtattcgtgggtatgatcatctaccaattcacgctcaacggtgccggcttcgaacagctcatctcgtcgtttacgatggtgccgcagatgatggctgagcagatagccgggaacggggcgctgatcttattccttgcgttgttgggggcgctcgtcgtagtcattgcggcggcaggcggctccagggcgtacggcgaatgggtgtcgacccacatcaagaatgcgaagatggcccagatcctcacggctgcactcggtatcatcatcttcgtggacgactacttcaactgtctgacggttggcgcggtcatgcgtccggtaaccgatcgcttcaacatcagccgcgaaaagcttgcgtggatcatcgattcgaccgcagctcccgtgtgcatcatcgccccggtctcttcgtgggcggtagcggttggcggctatctgggcgaaggcggcttctccacgtttgtggcttcgatcccgtacaatttctacgcactgcttacgattggcttcgtcttcttcatgtgcatcaccaacctcgatttcgggccgatgaagaccgccgagctcgaggcgcatcgttcgatggccgacaagcagcgcatcccgggcgataaggtgctcaagtcggttgcgacggcgggtattccgaagggagccgatccggataacacgcctccgtacgagaacgacctgccgaccgtggtagccgaggaaagcgaagtgctcgatgcggcagcgcagacgatcgatgatttcaagggcatcaaagtgtctgacaagggcaaggtgttcgatctcatcatccccatcgtcgttcttatcatcttctcgattctgggaatgctttacgtgggcgggttcttcgagggcgtcgaattcgccgaggccgtgggcgtcgatcccgtatcgggcctgtgcatcggcgtgtgcgtatcgcttgtcgtggcggccgcgatgttccttccgcgcgggcttaccacgctggccggctacatggagggcattgccgagggcgttcgttccatggtcggtgcgatcatgatcctcgttcttgcttggagcttgggcggaacgtgccgctaccttctgggaacgggcgaattcgtgagcggtttcctgaacagcgttggcgtcgatctcgcatttttgcctgcggttatcttcctcgtcgcggcgttcatcgggttttcgatgggcacctcttggggcacgatcgcgcttatccttcccatcgtgatcggcgttttcccggccgagacctcgctgttcctcgtggcggtcggcgcgacgcttggcggagcggtttacggcgatcacgtgtctcccatttcggatacgacgatcctctcgtcggccggcgcgcagtgcaaccatctgcgccatgtggcaacgcagcttccgtacgcgacgcttgtcatggtcgtgtgcttcgtgtgctacatcatcgcggcgttcatcggcaatccgtggattccgcttgtcatcggtgcggcggcaatcgtgattgcggtcatcgttttggcgaagaccggcgtgaagcttccaagcggcaagaagaaggctgcatagaagccgcaatccgcatagtcacaagccttggggccgtcgaagcgattcggcggcccttcgtttgcatgagcttcttaaccaggaaaaacgattgcaaaaaaacgattaccacgtttcgtgcgacacccttgaaccttttcgtgcgacagcaagcccctcgtgagtatctatagtttccatcgttgccccggcgcattggccgcaaggcaacgatggatgcaaacgatttgagaggagcttccgtggagggaagaaaactattcagcagaaggcaattcgttgcaggcgtggcggttctcggcggcacgcttgcactgaccgcatgcggcgcgaacccgaagaccgagaatccgacgagtggttcgagcgacgcaggcgcagaggcgaaggaaaccgatatcgtcatcatcggatcgggccttgccggttcagcgtgcgcccgcgcggcggcgcttggcggcgccaaggttacgcttgtggacaaggcaccgttctacatgtcgacgtttctcacctcgcttggcaatgtttcgatcgcccaggttcccgaaaacaaggagtactggcaattcgaagacggcgaacccgacacgatggaggctttcaccgagcgctacaaggcagcaaccgaaatcggaaaggtcgatgcaccgtatccggattacgagcgcatgcagcgcatgatggaagaaagctgcaagaccatcgattgggtgaacgagctcggcatcggtttcaaggagtcgtttaccaaagagcaggtgggcaccgatacggtgaagcccgacgcgcctaccgacccttccatcaaggcgggccaggatgttgccgatgcattccaggccgaactcgagaacctcggcgtcgagatcatgctctcgaccgaggcaaccaagctcttgcaggatggcgataccgttgtcggcatcacggtcaagaacgggaagcaggaacaggatatcaaggcgaaggccgtcgtgcttgccgtgggcggcttcgggggcagcgacgagtaccgcgacgaactcgttcccgctatcaacaagatgggcttccagtatctcggtaatgccatgaacaccggcgatggcatgaccatgggcaaagcggtcggtgctgcgctctacgacgactgctgggtcattcccaacgtcatcatgccgacccgcacgctcaccgaggccgagcccggttttgcgaaactgtgcgatacgggcatggaaggcgctgcaacatccgcgaaaatgctcgtcgatgcctcgggtaagcgcttcgtgaacgaggcgggtccgaccaccgcgcttgcaactgcgatgaccgataatgccgctggtccgtactatgtgctgttcgacagctcgaatgccgatgtggcggcccttattgaaaagggcatcgataccggcgatgtgctcaaggccgaaagcatcgaagagctagctgctgcagccaacgccgctgcgctcgccgacacgttcgccacctatcaggcggctgccgaagcgggcgtcgacggcgagtttaacaagaaagccgagatgctcgtgccgtatcaggacggcccgtactacctcgtttcgttcgtaccgtcgttcgtggcaacgatgggcggcgtgcgcaccaacggcgattgccaggtgatccgcgaagacgaatcgaccatcgaaggcctgtacgctatcggcgaatgcacgcatcgctacatgtacaatcgcagcttcgtgcgtcattgctcgaattcgagcgcgttgacgatgggtcgtttgactggaacggcgctggccgaggcataggcttctccgcatcaccctcctcccttgcgagccgctgcgatcatcgtggcggctcgtttgtttgagcggtgaagcgcgtagaatgggcgatggcgaagaggtcttctagccgcgcagtcgccgagcctccatcgtctctatgaggtcgagcagctcttggcgcgaatggacgctcatcttcgcgtatgcccgccgcaggtgggttttaaccgtgtgctccgacagcacgaagtagtcggcgatgtagcgtgcgctgcgccctgccgagaactcgcggatgatctcgacttcgcgatccgataggctgtacgtttcgctcagcagatcaagcgcggcctcggtcgcatcggcttgggcggcagcagagtcggtcagctcgtcgggagcatcgtcgagccggtgctccttctgcttggcgctgtaccgcagatagcttgcgaaaataagcgaaacggtgacgacgagaacccaaatggcaacgatggtgacgttgtgcggctccaaggcaggcggctcgaagagaagctgcgcaagcagtcgccctgcggcgatcgagaggcgtgcgacgcccaaagccaacccgagcaaaaagaaagccggcagcttgcgctcgtaggcttcgctgatgaacgtgagccacaagagcacgtaaaacgacatgagaaacgtcgtgagcatggcccctgccaaatagccgtcgcctccatcgaggcttcggtacagcagaatcgaagcgaggcagagcgcggctatcgggcagatatagtcgatgttggctttcttcagcttcagtacggcgaggatcgcacacatggcgatcgatacgccgatggcgagccatgcggtgagatcggtttgcgcgtactgcagatcggagaagatgtccatctgaatgatgaacccgcatacgagcgagaatacgagcgtgctggccacggcgcgtcgcgtgcgcgaaaacgcctcagccatcgatgtcttcggcgcaacggtttccttcatgcgctgcgcgatcgcttggttgtgcacgaggcagtagtacaacatgatggccgaagcgacgaatacgacgaggaggacgatctggcgatagccggggaacagcgcgctcgacacaggctggatgagcgtatcgatgaggtagccgagtgcgatcatcacaagcgaatggaacggacggtagctcgtgaatacctgcatccagcacaggatcataagcgcccaacccatcccggaggccgcctgcatgaggacgagcacgatatccgattggcttcccgagacgatgagcgctgcgtatgccgctgcgacgccgatacccgtccagaagagcttgaatgtgctttcgatgcgcacgaagtacgacatgagcgcaacggcaagaaacgtgcagccgtcgaacgcgaggccgaccagagcgaaagggctcgaactgtacggtcccgaattgaggtcgagtaggcgcgcgccttgcagaaagccgaagccgacagtggcaatcagggcgagggccagcgtgttcttgtcgaacagcttcgggcggttttcatccctgccggtcgcatttgcgtttgcgcctgcattcgcattcatgctcattcgcttacgattctcgggagtttttgatcgtgcaggtcgcatggaacctcgtcgatgcgctgctccttgaaagcgacgccgacgacgatcgcgttgtctcggaggttcgggagaagcctatcgtagttgcctcctccgtacccaaggcggctgtttttgctgtcgaaggctacgagcggcacgacgaccatatcgagcaacggcggatcgactgcgggaaagggggagatatccggatcgtcggtatcgaacgatcgcagggggcggtcgagaaatgcaacgccgccgagttcgtactgctcgcgcgaaacctctcgaaacaccatggtcgggcctttgccctccgacgtgggagaagggcgcatcatgcagggaaagcatgcggaaagcccgcgatcgtacaccgtttcgatgaagcggtcgatcgagacctcgcttttcatggattggtagagcgcaaccgcgaagggtttctgatggtagcagaccccgggttctcccgttacgttttcgtacgagcgaagtgcgtcgtcgaggatcgaggcgagctcgctgcaaatcgagccgcacttctcggcgcgctcttccgccgcgatgcggtctcttgcttcgagggctgaagcccttgctgccatcttgtccattcccacctccgttgtgcctacgatagcatagtgctcgagggtttgcgacgcaacggctccgtcgttcggtatggcgaagcgatcgctttcgtttccgggcggcgcaacggctctgccgcgccttgcggaacaccgccggggagggaggctgtgcgtccagctagactatctatctatctatctatctatccatccatccatccatccatccatccatccatgagggcggctatcctcatggcccaataatatgcaatatcatactaaacaggtcagaattatggagatattgctaataatgtaactctttcccatctatttgtcagaaaatgagggaaattgcttgcggaagaacttacattccgtgtagacttcgatgcggtaaggaaagaggttgtgaatcatgtgcagatccgcaggtcggattacggtatcgaaggcgcctgcgccgatgggcctggatgaatgagggagacgctgtggcgtcttcgcttgtttcagggcaatgattagcgaaacgcttatcgattgcgttcgtcatgcaaccgaaacgaaagctctttcgcgtgcagcgcggaagccgcacccgtctgggaagaggcggcgtgcaacggtctaacgtcggaaacggcagaaagtggggaaaggatgcagctcaaagcttctacggattatggaatccgcaccatcctctatttagcggcggaaagaagcgtgcgttcttcaaaagagatcgcccgtgaaatgtcaatccctcgagattacctcatccagctcgcgcagcttttgcgcaacgccggcctcatcgaggcgaagccgggcaagcacggcggctatgcgcttgcacgcgatgcttcggacatcacgcttttggagataatctctgcgatggaagatgccatcaaggtcgatgaatgctcaggcgatcagagcacctgcgatcgcgaccccgccgactgcaaccagttctatcccgaagaggattcgtcgggcaagagcgaaggcagcgagaaggcgtgcaaggtacgtcgctcctatgcgcttatccaggagagtttcaacgcatacctcaacagcctgacggtcgatcttctgctcgattgcgcccgcgaagcgcattgcagcatcgagtatctgtcgaagaagctgtcggaggagagcactcggttggccgagctggcagcatagtcgcttgccgtaagcggcgcgcggaatcttatcgttgctgcctgcagcaaaacgctgcgttcggtgcgcttgcgacatgcgcttctttgttgcttgttgcgacacgagaggcgaccctgggttttgcccggggtcgttttgcgtgcaggcgatgagtgcagcatgccggcttgcgcgatgccgcacctgttaggcgcttgcgtgcgctcgccgattgcggctaggagccgaaaggcggccaaactgcacggtttttgccagattcatacatcggcgatttgctttcctttccaatgctcctgcctgcggctctgtgaacagggcgaacagctcgcggggtttttgcgatgcgttttagagaaggcattgggcgccgcagatgtatgaatctggcaaaaaccgtgcagtttgatgcgtttttcgtgccagcctcaatggactcctgtgtatcgattcggcggcgaagcgcagggatcctatactgccacatctccgatgccgagcgcctgcatcacgaggagcgctatggtgagcacggtgacgatggtgacggtcgcccagatgaggatgcgggagacgggcttgcttttgtaagctcccatcacacgtttgtcggcggcgataatggccatgaacacgagcagcaccggcaggatgatgccgttgacgaactgcgccgtcagcatgacgcccaaaagatcgatgttcgggatgatgaccaccgcggccgagaagatgatgacgaacgtgaggatgcccttgaacagaggagcttccttccacgagaagttcacgcctgcctcccagccgaacgcttcgcagataacgaacgaggtggtgagcggaagcacgcaagcggccaaaaacgatgcagcgatgaggccgatggcgaacagcgattcggcatattgccccgcaaacggagcgagggcatgcgcggcgtcggcggcgctcgtgatttcgattccttcggggaacagcgttgcgcccgtcgtcacgatgatgaaccacgccaccaggcaggcagctatggttcccgagatcacgtcgactcgctgcgagaagaaatccttcacccccacgcccttttcgacgacgttgctctgtgcgaagaacatcatccagggcgcgatggtcgtgccgatcatcgcgatcaccagcgatatgaagctcgtatcgttcaccacatggggaacgacggtggcgatgagcgcttcgtcccagttcggcctggccatgaaggcggcgaatatgtaggtgacaaatacgagcgaaaggatcaagaacaccttttcgacccgcttgtagctgccgcccacgacgagcagccagacggctgcagcggctatcggcaccgatatgaattttgaaacgccgaacatttccatgccgcttgcgatacccgcaaactcggaaaacgtggtggccacgttgccgatgagcagcgcgagcatggcgagtgccgtcaggcggatgccgaagcgctcgcggatgagcgcagcgaagccctttcctgtgacggcgcccatgcgggcggcggtcatctgcaccacggcaagcagcacgcacatgacggggatgacccagagcgttgcgaagccgaacttcgcgccgacggtggagtacgtggagatgccgccggcgtcgtttccagccatggcagtgatgattccagggcccatcgcggcaagcagcagccagagtttgctcggacgcttgtcggttgcttttgcttcggatgccggttcggcgggtgcgatcgattcgttgttttgaaccttcggggagccgatccttcccgtgcggaagatgccccattccctcgttggcttatcggagcgattcctgggtgtcatggcttacctccaagaatatccgatgatctggaacaagaccaacgtgtagagggcgagaatgaggatgcccaccaaaacgatgcccgcgattttgaggccgagcttcttcgccttgtcgctgcttacatcctcttcgatggcatcccacgcatcgtcgacggtgacgatgccgagcaggcttccgtgctcgtcgaccaccggcatggcgggaatgtcgtacttgaagatgtcggcggcaacttcttcctcggtttcgtcgggcggcacgctgatgatgtcttcgtaggcgacgtctttgatgagcgtgcgatcatcggtcagcacgagggtgcgcagcgaaagcacgcccacgagtttctcgtaatcgtcgagtacgtagacgtaatggacggtggggtggtcctcatcgagctcgcgcagcacctcgatcgtttcgccgacggtataggtttcgggaacggcgacgtattgggtcgtcatcatgccgccggccgtgccgtccttgtagccgaggagcctgcgaatttccgtggcgtcttcaacgcccatgaggcgcaaaagcttttcggccttctcgtaggagaggtcgcggacgatgtcggcggcgtcgtcggggtccatgctgccgagaagtcccgccgcgcgcgcatcgtcgaggtcttcgataaaatcggcctggtactcgtcttccatttccgagatggcttcggtggcctgggcatcgtcaagatgttggaacacgtttgcgcgttgctgcggatcgagctgttcgaggatgtcggcaacgtctgcggggtgcaactcgtcaaggcgtttgtgcgtgacggaaagctgcacctcggagaggtcgcgatcgagcaggtccatgtaattccaggcgatgatctgctcgtcgatcttcttcccaaagagcttggagatggcgacaacggccctttcgagccagggggcgagtccgcgcaggatgccgcggaaccccacttcggcgcccaacaggcgcagctgcgatcccgactccgaaagcttgaggtcgtttacgcgtacgaccttcatgccctgcgtatcgacgatctgccggttgagcaggtcgcgtgcaagcaggatctcgtcaggctgcaggtagctgaagcggatgttgtggctttccacgccgagcgtgatgccgtcttcgtcgaagctttcgacgtacttgcgccacgagatcatgaacggagtcttgcctggaccgaggaaggccaggctggtgatgcgaggaaacacctcgcccgtcgagatggcgagatcggcgatggtgccgatcttttcgccggtggaatcgaccaccggtcggccgagcatttgagacaaatagagcataatcttcccttaccgtttcggcatcggcgcgcagcgcatcgcaaacatgaggaaacgcgcaggttaagctgtgcgtttataggatgtgttgcgtaccgatgttttgtcgcagtcgtccttcgactgccgacaggggaagtcgaaggctaattactgtgaggtttcggttttcgaaccttcaagtaatatcctttccttgagccaataaaaaagccgcacgtgctggatttcccaatcgttgcggacataagcctgttcaaaggcacagttgataataagttaataattcccgttagtcaaccgctacagacgaacggtcggaatctgcaaccagatttttaccgaaaaacgcaaatgcaatcgatatggtttggcgcttgctcgcacagggctctgttgttcgaggcgattcttcatgggagtggagtccttgtcgatatcgatgcggacaatgcatcattgaatcggccgtgctctataattttctatgttgtgtgtttctgcccagaagataaagcgaccgctgaattcagtcgataatcgtgcttggctttccgaacggcctctgtgccgaaggagccagcgtgcggtggcaggtagatctagcttattacaacggatttttcgaagcttggttttgccagcggtctgcttgatggttttgggatgcgcttgctcttcccaaaaccatacgctgtgggctccattgttcgaaggaatgtggtatggctaaatacaaatgcagcgagcgtacgcataagaagatatataacgctgctcgggagctatttgccgagaggggctacgatgcaacatcgctgatcgatatcgccaacaaggcagaagtttccgtcggcacgctgtaccggcactatcccgccaagcaatacctgcttctctatgcagccgacgatgcgctagcgagcatgagagcgcttatcgatggcttttccgatgatatgagctgctatgaaaaaatactggcagttatgtctgcggatatgcgcgactgccttgaggtgttcgattcgggggagccgtctgctgaggatcttggatacgggctccatcttgaacacagatccgcaatctactcttcgccgaccgcattcgattatgcctacaggaacagggcggcgatgaaggccttgttcgaagatatgttggagcagggcgttcgaaacggggagctggcaggggagaccgatatcgcggactttgccgatatcctggttgcggtgttcttcaggcagtacgaccttgccctgtttgatcccgatggcgatgggagtctcggggctttagagaggaagctctcttttttatttgaccttctgaagccctagcggcgtcgaggctgccatagccacgctctgcaacaaatcattcataaaatagaataattaacgacctgttctttggcgtgcgcgtctcctagaatactctgtgctctcaaaatggtgttcaaacaccattttgagtttaaacataattactaaacgtactaacagaggaggagatatgggtaaagcaaagacgaagcttgcgatcgtcctcgtgcttgtctgtgtgatgggcgcccttgccgcatgcgcaccttcgtcatcagaatctggaggcgatgcaggcgagccagcggcaagtccgtatgcagacggaaaggtcggcaacaaaacggggttcgatcccgaagggccctatatcgagaatatcgatcagtatcccgaagcgatggacgccgcggatcgtaatgcgcgcaacgccgaggcgaacaaaccgagtacctatactgatcagtttggatttaccgtacagccggttccggcagatcccaagggatttaacatgacgtacctcaatgctgagaaccgagggtgcttgtcgtgccatacgacgattgaggatgctcttatgagcatggatacatggcatacggttggggctatggggtatccaacgcagcttaccgtagcgaactgcatcggttgccattacagcaaagtgcatggcgatcagcggcctatgagctcgaatatgcacggcatccataatggcaaagagggctttatcgagatgggcgggacctgcgattcttgccacttcgttgacggcaacggcgattttcaaatgtgggactacgtaaagtacgatcagtaccgcggcatcaccgatctgaccgctgaagaggcttctctttcggttagttacgaccaggagacgatcacgcctgatggccagatattcttcgagggaatgcggcaggggagcgatcctgcttcatggatgactgatgacgaaaattacgacgaagcgcttgctgacagctgggttgttaccatcgatggcgaggtcgagaatcccatcgagatgacggttaccgagctcgttgagaaattcggtaccgagaccgttgttgccaagcaaaattgtctggcgaacggcgttgcgggagggtggatctaccaagcggagttcacgggggtgcctatttccgcgatcctcgattacgtcaaacccgctgaaggggttcagcaggcgcttactgtatcggccgacggagcctatcagctcaacttgcctatcaagtactatgaaatagagaacgctctgcttgtaaccgaaatgaacggcaagactcttccgccgagccagggttatccgattgctacatgcttccccggtacgtcttctgggtatatggtcaagcagctcgagcacatcactttctcaagcgaccccaccccgatgggcaagatgccaatcgggcagttggtcaaggaccctcagaccggtacagcgatcggtttgccgaacagtgccgtattgagccaccccgatggggttctgctcgaagggcaagcgggtaaagagcttactttcgaaggctatgccgatggatgggacgaaccgatttccaagatagaattttcgctcgatcacggcaagacttggaccgaggtggagatgacggaagattacgatctcgacaaatgggtttattggcgcataaacatcacaccccccgaggccggatcctatctgctcaacattcgaaccacaagcacgatggcggacggaaccgagcgagtctgcgaccgcaacacgcagttcctgtttacggtcaactaaggaggcgaccatgcaagacatgaagaagaacatgctgctcggcaccatggcagcttcgcttgtgctcgcaggtggaggaacggctcttgcagaagagatgctgccgggaacagacgacgtgtcttccgcaaacacggcagttgatgcctcggacggcgttgcgtcgggtttgagcgaagccgacgcctcccagggcgagttttcctacgaccagaccacgatcacgccgaacgacgtcatcagggatgtgtttcggcgcgcgactgcagcattatgcaacgcgaccgatgacttcgcaacgagcaatcccctcgaatggaagatcgcggtgtcgggcgacgtcgatcaggccttcacggctgcagtcgacgaacttgcttccgagagcagcgtcaaacagatcatgacctgcacgtgcggcggcaaccctgccgacggaaaagctgtcgtcacggcagatgtgaagggtattccggtgtcctatcttctggaccgcgccgatgcgcgtccggaggccaacacgctcacgtttgtgtcgagcgacgggaccgagcttgcgattccgattgcatacgtcgtcggccgccacggggtcatctcctatcaggtcaacgatgaggatctgtcggcttcggtcggcggcaacaatcagctgtggatgacgcgcaccccagccaactacttcatccgcgatatcgtcgaggtgagggtgactagcgaagcgaacccgcctgaaaaccctggtgaggggatggaataccccaatagcccgaatgtgggcattctcaatgccgagatcggctagggtaaaagcgatctaaggctgtctgccaacaagcaccgaaaggcgaacttgttggcaggcttcgacagcttaaggaactcgatgtttttcaaagaggctgtctccgccgatgtgacggagacagcctatacgagtcgttgcttggtgtgttctgactcaagcaagcagcgtctaaatagcccttgcggtcaggttgcccatcttgatggcttgcgcgatgtcgaacggtgtgtcgcagtcgccgatggtgtgaacctcgtatgccgagccgagttcgtcggcgagctgggtgttgggcaccatgtcgtagcactcgagcacggtttggcagccgagcgtcttctcttcgcccgtcgaaagggtgatggagaggccctcgtcggtcaggcttccgatcttcgcattgttccagatcttgacgccctggctgtacagatgggggatgacgaaggcgcgcacccacatggactgctccttgtcgatgatctccttcgcgccctcatggaccatctgcaccttcttgccctgcgcgagcaggaacagcgcgcagtcgatcgcctgagcaccggcgccgcagatgacgaccgattctcctatatcggaaccgacgagcgtgtcgacgctgacgacgttgacggagccggtagcttcgagatgcgtctcacgggcacctccgacggcaaccacaacgacatcgggggtcgcctgtgaaacgacatcggcggttacttcggtgtccaggacaacttcgaccccgttgacttcctgctggcgcgaaaggtactgcaccagatctcccagtcgctcgtgatcgcctttgaatgcgcgggcggtcgacacaagtccgccgagagaggatttcttctcgtaaagcgatacctcgtgtcctcgttgtgccgcgactcgcgctgcttccatgccggcaggaccgccgccgacgaccatgacttttttgggctgctcggcgggcaggagcgcgtagccttcgggcatctcctcggtgtaagcgcgctgcgtgacggcgtttacacggcagtactctttgccgtcggaggcatactcggcggggccgcccttggcatgacaatgcatgcagcggcagcaaggcgcgatctcgtcgtgccgaccctcttgaagcttgttgggcagctcggggtcgacggtcagcggacgggtgatcatcaggtagtcgatctcgccttgcgcgaccgcgttgttcatgaggtcgggggccgtcctcgggtccatgtacccggcgcacgagacggaggccttcttcaggttcttcttgaatgccgccgtggcgcccagaagcaaaccgcatcccgagtactggccggttgcgatgccgccgaaatgctgggagaagtcggcgcgggtaccgaagcccgtggcgccttcgcactgatagcccgtgaacatgaggtcgggtgcgaattgggcgatgtgcctacccggcaccgaaagacgcaggtagaaggtatcggcgcctgcggcttcgaacgccagcgcatcggcgatgctttcctcgagcgagaggaacccgtcgctgttgccgaggctcgcatcgttttcctcgacggcatccatgaggatctgcacggggtaatcctgcccgcaggcttccttgatgccctggatggtttcgcagatgaagcgcgtacggttctcgacggtatcggctccgtactcgtcggtgcgcttgttggttcgcgccacggtcatgtatttcaaaatctgggtcgccgcgcagtgaagctcgacaacgtcgaatcccgctgccttgagctgcacggacatctctatgatgagatccttgagccaggcgatgttttccggcgtcatgtcgttgatgaccgtggtgtcctcggtgagcattcccacgccgatctgaaatccagcgtaggcgtcgtgcttatggatgcgctcggttaccggcgccatcagttgggggatcttgctcatgtcgtcgagcagccatccggttgccgcctgctcgaggggcttgacggccatcagtttcgagatcgagctttctacgaacacgagggatgcgccgcctttggcgaagttctcgtagtagtcgaggaagttgtcgttcagggtatcgccttcaggtgcccaggtatccgagccagcggggcttttcacgatgcggttcttcagggtgatggcgcccataggaagcggctcgaagagggcggagaaatcggtggtgtttgccgtatatccctcgtcctggggattcaaagcggtggcattggctgaaacgtcggctccctcagccttcgcatcgcctgccggcttcgatgcttcgggctggggcgtgcatcccgtcaatccccccagtgcagctgccgatcccagtgcggctgccgttgccgctgctgctccgataaagttacgtcttgtgatgtccatgcgtggtcccttctccttagtgccaaaactgcgcgctatgcgcatcagacggtttgatggtatattcctgtaatgcactgggcatcgcatcaatcatggggaatggctggtgctaggcgaagatcacatgaatgatgtgagtcgggcggcgtcgtgcgaaactcgcagcgttctgttttcgcggagccagtaggggagaatcgaaaggatgggagcgcacgatgcctctcgtggagtccgagcgtcgaaagagcagcttcatagcggcattgtcgggatacccggttgccgccgcttttggtctcgctgcgtttcgcgtgggcgcatggactatcttccagaacgggccgggtttcacggatggaggcattccctttttcgctcatgtggtgcaggctctcgtgatggttgccatcgtcgttgtcgatcgaaaggttgcctactccgagcagtcgttcgtacgagcgttgggggttgcggctgctgtaggcacccttgccacgctgcttgtgctctcgcccgtgtctgccgtggcgtatgtgggcagcgcttttcacggtgcggcaagcgccttcgtgatggtgggagctggggtgtatttctgttccttaaagccgaatcaatcatgcgttgctctttcgttggctttcgcattgtacggaatcgccacgtggacgctttcgttcgtgcccgcggcggcgatcattgcggtatcgcttgcgtgctacccgatagccttcttctgcttgtatctcggcattgccaaaggaaagccgctcggaggaccccgaccgcccatcgacagtgtgcatacgggttccattccgtggaacatgcttgttttgctggggttgtgcactttggcaagcatgatggcgagggtgctcgttcccatgacggaagagcttttgctctctgcttataaaatgtattggccgatgattctgctttgcattttcgcgctgtgcttcgtgtggatcgtggtgctgaaaaagaacgcggaaacaatctggccgttgttcatgatgataattctgagcgggtttttatgcttttcgtcgttctcaagggatgaccctctgttcgccgccagcttctttcgggctacgcgcgaatgccttatgcttttctgttgggtggtgattgccggaaccgccagcaaaaacgatctgccgcggctgccgtacttcgcgattacgacgttggttttgctgtcggggccggtcatagctacgtctgcggcagggtttcttctgcctgctcgaacgtttcaaattcccgattcgggcgcggttattgcgactacgatcatgtcgttcatccttattgctgcgaccatcgccgtttctctgtcttggaccgcatcaacccgatcggcgcggcgcttgggcgaggataatttcagtgttgcggacgcgtgggaggatacgctcgattccgttgctttggaatatggtcttactcatcgagagagggaagtcgctgcgcttttcgtaaagggctacacggttccgcacgctgccgaggctctttgcatctcggttgacaccgtgagaacgcactcgaaaagcttgtacagaaagctcggcatccataaaaaacgggagctgatcgctcttgtggaaggcgaagggaaggaaggcgaagcctgaacgtaatggtaatcacgctgctctgcccggcaaacgcacaactgctgcaacgcctttcggctcgatgttttccaaacggatcgtgccgccatgggcttcgatgattccccgagcgattgaaaggccgagcccggcgcctcccgtttcgcgcgatctggccgtatctgcgcggtagaagcgatcgaacacgcgctcgagatcttcttcgtcgatgccgattcccgtgtcttccaccctgatcgtggtgtcggacccccgtacggcaacgctcaggcgcacggcgtcgccggcgttcgtgtacttaagcgcattgtcgagcaggatggccaaaagctgccggagcttatcgcggtcgccgcgcactaccgcctcgtcgccttcggcaaattcgagcgactttccctgcagaagcgcgatgtcgtcgtatgccgaaacgacgtcggcacacagattccgaaggtctacatcgcctatcgcaaggtcgaagcgtcccgcgtcggttgctgtgagcgcaagcaggctttcggtaagccgcgagagacgctctgcctcctcgattgtcagggttatgtcctcgaacttgtcgacgatgcgcgcgttgggactgtcgagcagcagctcctgggtggtgcggatgacggtgagcggagtgcgcagctcgtgcgaggcgttctgcacgaattcggtctgcttcgcccaggcgtcggcgatggggcgcagcgtcatccgcgaaagcagatagctcgcacctgcggagacgacgagcgcgacgacgaggccgccgacgagcatggcggtgaactggttgaggatggcgatttccgaatcgacgttcgcgatagcctgcatataagaagcgctgccgtcgttaccctcgatccgatagttgacggctcggtagtggtgtccgttttgatcgatgggatacggtgtgttcaaaaccgacgaatcgaacggcaacccctcgatggaatcggggtacgaagcgtatatgccgtacgtatcggttgtcgaaccgtcgctcgagcgggcgaggaagatggtctgggggttgttctcgatggatgagtagatggtttcgctcaatgagacctctccgaggctatcgtctgatccgacgtcgtctgcgcttggatcggcgtcggatgattctccgtacggattgtcgaccgaaagggcggcggaaggaacggtatcgacgatgacgccgaagctcggaagcgaaagctgctcgtcgacggctttgaaaatattagagctcaccgtttggtacacgaatatgccgagcaaggtgaaaatgagcccgaacacgacgaagaacagcgcggtatagcggatggattcgcgcttgaggcgatcattctcgatcagcgaaggagtcgtgtgcgtcttctggatcctctgcatcatgggcgtcctcttccgtaaacaggtagccgaccccgcggatcgtcttgaggtatgtatcgtagccgaaaggtttcagctgcttgcggatgccgctcacgtatacggcgaccacgtttgaagaggtgtcggagagaaagccccataccctgtcgaacagctgggttttcgagataagccgatcccggttgctcaccaagtattcaagcgcatcgaactgcttgcctttgaggtcgagcgccacgccgccgatttcgacggtgcggcgcgagcgcgagatgacgagttctttgaacacgatgtccttcgtgtcgtatgcgcccgtggttcttcgaaggatcgcctcgatgcgcatgacgagctcgtcccgatgaaacggctttaccaggtagtcgtctgctcccgccctgaacccgtgggctttatcggcaagcgtgccctttgccgtgaggatgagcacgggggtgtatacgccctcttcgcgcaatcgttcgagcacggtgcagccatccaatgcgggaagcatcaaatcgaggatgatcaggtcgtagatgcctttgctcgcaagaaaataaccctctgcaccatcgaacgcctggtccgaatcgtacgggaggggaaggcatcgcttgatcgcgtgcgataggttgcggtcgtcttcgacgatgagaattttcatgcatgcacctcttcgcgcccattctaccatccgtttcgttaaacgaaggttaagcgagcgtggagatatctccacgaggtgcgacgtctggtttcacgtttctttaaaggcagtttggttaggatgcgcagcattggaaccgacaagaggagttgcaatgcatgcgagaagcaaagcgtatagaaatctagtgatcgtattggttgttctgatcatgctgggggcggggctcgtgctgcttaaaaaccttggcgcgcagagcatgctgggcttcggcgatggggcgtccggcggtgcatctgggactccgggcatcttcgaatacgaggacactgcgggcggagatggaagcgttgagatagcgacgacgccgtccgagacgaccgatcccgaatctgacggcaggtctgcggaatagttgaagtgcgaactggaaagaggaaacgatcatggcgaaaaccataggcaaggcagcggtcgtactgctgctcgttgccgttttaggcggaatcgtatacgtgctgatagggcaagatgctgccgcatcgggggctgccgagcccctggagatgcccaccgctttggtgacgaagggcactatcgagaagctcgtcaccgggccgggcgaggtgaagcctgccaaaaccgaaaagctcaaaatggccaagtggcgatacttcaagtcgtcgccggtaccgctcaatgagcgcattcccgccggtacctcgctggtcgattacacctacggcgattcgctcgttgcgccttacgatctggtcgtgctgtcgaaaaaccttcccgaaaaagaacgagacgagctgaccgaggatcactacgtggaggttgcgcgcgtcgattcgatgcatgttgagctcgaggtgcccgaaaccgatatagccgatctgtccgtggggcaggcggtcgaagtgaagcttgcagctaaggaagacgaagcctacgagggcacggtcgcaagtatcaacgaggtgggcacctacggagcgaccggctcgaagtacaaggtgaccatcgagattccaaacgacggcagcatcctcatcggcatgtcggcgaatgcgagcatcaaggtggccgaggctgccgatgtgctgacggtgcccgtgagcgccgtgaccgacgggggagaaggcgtgcggttcgtgctcgtgcagcatcccgacggctcgcttgagcccgtcgaggtcgaaacgggcctgtccgacgggacgatggtcgaggtcggcggaaacctgaacgagggcgatgaggtccttttgaacgatgcgctttcttcgggcgcaagtggcgaaggcgaaggcgacggtagtgccggcggtgtcagtttcgtatcccgcgtggccgcaggttgaggtgcgccatgattgccattacccgcttatccaagctgtaccgcatgggcgataccgagattcgcgcgctcgacggcatcaacttcgcggtgcgccgcggcgagttcgtcgccatcgtggggccttcgggatcgggcaagtcgacgctcatgaacatcatcggcttgcttgatgcgcccgacgaggggacctatatgcttgacggcgaggatgtctcgcacatgtccgacagcaggctcgccgccttgcgcaatcgcaagatcggttttgtgttccagagcttcaatctgctcaaatcgatgagcgcagaagagaatgtgcgcgtaccgcttgtctaccgcggcatgcgcgctcggcaagcggacgaaatcgcgcggggcatgctcgcccgccttggtctcgagggtcgcgaaaagcacacgccctcccagctttcgggcgggcagcagcagcgcgtggccattgcgcgggcgcttgccggctctcctgacatcctgcttgccgacgaaccgacaggatcgctcgactccaagacgagcgctgagatcatggcgatgttcaaagcgcttaacgaacaggggcaaacaatcgtgctcattacgcataaccccgagcttgcccgcgaggcgggccgtgtggtgacgatttccgacggcaggctgttcgaggaggcggttccggtatgaagtggctgcaaataggcaaggaagccgccaaaaacgtaggccgcaacaagctgcgcacggcgcttacgatgcttgggctggtgatcggcatctcgtcggttatcgtgctggtgggcatgagcgacggctcgaacaggcaggttgccgagcagatgaaggcgctcgggggcgatatcatttcggcctacgtgttcgagggatcgcttgcatacgacgatatggccgaggtgcgggcgcttcccgccgtggccgatgcggcgccgtcgaagtttctcaacgcttcggtgagtgcgggcacgaagagatcgaaccgcgcgatggtcgaggcatccgacgagcactatctgcccgtgcgcaacctcgagctcgcggcgggtcgcaacctctcgtcgatcgatcgcgagaacaagtcgaaggtctgcgtgatcgggggcgcggttgcgcgcgatctgttcgggacgaccgatgcggtggggcgcgccgttaagcttgcgggcgacgagttcaccgttgtgggcgtgctcgcagagaagggcgaatcgatgggtctcaacaccgagggcctcgtgctcgtgccgtttcagtcggcgggcgcgttgggatcggacgggaagatcgaatcggcctacgtgcgggcggtgggcgacgatgccgtgcagcttgcaaaggggtccgtctccggctacctcgagcgcgataaaggcattgatccgatgatgttttccgtaaatacgcaagacgagcttttgggcgcgagcggatcggtgagcaagacgatgacgcttctgctcgcgggcgtggcgagcatatcgcttctggttgcgggaatcggggtcatgaacgtcatgctcgtatcggttgccgagcgcgtgcgcgagatcggtatcaagaaggcgctcggcgcgcggcgcggcgacattctggttcagtttctcgtcgaagcgcttgtgatgagcttgttcgggggcgtgctcggcattcttttggggatagcgctgtgcgcggccgccgagtacgcgggcattccgtgcgtcgtttcgccgacgatcatgggcgtcgctgctggagcgagcatactcatcggcctcgcgttcggcatcttccccgcgcaccgtgcctcgcagctgcaccccgtggaggcgctgcggcaggagtagggcggcgggggatgaccggagaacgacggattctcgtcaagacagcataaagcgaaggcgcgcattgggggcaatgcgcgccttaatcgcgatgcaacgcattacatgcttggcaaggttagtctagctcacgtagttctcgcacgcatgctccgcagcgcgtaagcctgagtagatggcgtagctgaccaggccacctgaaagcccgtagttgtaggtttccttgtaaagtttgttgccgtcgacgcctacgcaatacaggccctcgatcggctcttcgttctcgttgagcacttggttgtcgtagttgacgtccaggccgccaatggtgttggtgaccgtcgggtcgacgcggatggcgtagaacggaccgctttctacgggaagcaggtactgggcatccttgaggtaatcctcgtcgacaccattgctgcagaattcgttgtagcgttcgatgcttgcggtgaagttctgggtgtcgatccccatggcttcggcaagggcctccaccgtgtcggctttaaacgcgttgcccgcgtccgctgctacacattcgtcaacctgagcgaccaggccttcaatgttcgaccctggcttgtacatgcgccagcccgccatgatgccttcgccggattcgaatctatcgagggttgcttgatcgaaaacagaccagcatcttttctgggtgagaaccgcattgacaaacagcgctttatggctgtggatgaaaaggctttcgtccatgcagcgattccctttctggttcaggaagagaaggggctgattgcagcaaccgaccgtaatgggatcggcgacaacatatccttccacatgcactgccggaagcatagcggtcatataggtgcccgcacctacgtcttccgccatgatgacgccgtcgccggttcccgtggcaacggcattggcatacgtcatatcccaggttgtgagctgctcgatgagcttgttgtttgctgcgtaaccgccgcaccccgcgattacggccttcgaagtgacttcgatgtagtctccgttttcgtcacgagcatataggccgactaccttcccgctatcggttttcaggcaaacggccggcgtggtgaagcggaattcgactcctaggtccttggcgcggttctcgaggaactcaaccaaggtggcgccggactggctgatgttttcgtcatcctggccgccccagaaatggaagcatttgaatgtgttgatggatgatttgtacacatcgacgcgatcgaattggtatccgccttcttcgagccagtcggccgttttgcccgattccttgatgaaggttgtccacagtaccgcgtcagaacgatagttggtgtagatgttttcttcctcgacatattccccgacagaggccagttctatgccgctgcgctcttgaagcttgcttccccatccgaacatgccctcggtgccggccgtgcttccgccggctacggaccctttttcgaaaacgataacgctggcacccagctcggcggctctgactgctgcggtcatgccgctgcctcctgcgccaatgattgcgatgtcgcattctatctgctgtgtggttttttgcgatacatcggactcgaactccacgatggagatcttgcgggcttcggggtatttcacgtcttcggcgctcgatgcggctccgccttcggcggaagatggactcggggatgcagaagagcatccggatacaagagcaactccagccaaactcgctgccgctcccgccgctgccgaacccttaataaaatccctccggctcagttccattgttcctcctcctctatgtggacctgattgtccaatcgaagacgaggttaacgaatgctgggttgcccggtaacacacgcagggggtggttatattacgccacacgttttatgtgggggtttcatcgggcattttgccgatgcactgggcttatcgaggtttgccggtgcgcagatcgctgcggctcctttcgattacgagttgactattgcagcgcttttgctacaccgttccacgctccactgctacagcgctccatggcagactgccacaccctaacaatctaaattgccacgcgccccgaaaggggcgcttccttttccgccacaattccgatgggcacaaaagtgcccatcggaccattgcgagaaaggaagaaaaaatggtcaagtacagagaaatacttcggcaaagggcgatgggggtgagtgtcaggaacacagcgttctcgtgcaggtgctccaccgcaacggtaagggcggtgaccacccgcgcgaaggcgcacggcctcgagtggcccttgccggaggagatgaacgatgcggcgattcgagccgtcatctatccggcaaaggagcgatccgatatgtcgaaggcggagatcgaccatccccgcatcgacaaggagatgaaccgtcccggcatgaccatgctgacgctttggagggagtactgcgaggacgccctggcatcgggcatggaaccctacctgtactccgccttctgccagaagcaccgcgcctgggcggccgccaacaaggtctccatgcgcatcgagcgcaaacccgcccaggagatgcaggtcgactacgtcggcgacaccatggaggtgctcgacgccgacaccggcgaggcgcgcaaagtctacgtcttcgtggcgtgcttgccctattcgggcgagatgttcgccgagggcgcctacaacatgagagcggagtcctgggtcgaggcccacgtccacgccttcgccttcttcggcggcagcgtgccgatagtggttcccgacaacctcaagcagggcgtcgtcaagaacaccgtcgaagagctcgtgatcaacgagcagtaccgcaggatggccgagtactacgggtgcgccgtcgtgcccgcgcgccccaggaggccgagggacaagggggcggtggagatgagcgtgagggtcatcgagcagcgcgccatcgcgccccttcgcaaccagctgttcacctctctccggcagctgaacgaggctcttttggagaaggtgcgcgagatcaacgcccgtccgttccagaagcgcgagggcagcagggatgaggtcttcgtccgccaagagaagccgctgctcatcccgctgccgggcaagccctacgagatggttacccgcaaggttgtcactgttaattttaactaccacgtctcgtttgacggatgctggtactcggttccgttcagctacgtcaagcgcgaggtggagctatgcgccaccagatccgctgtttgggtggcctgcgacggcgagcgaatcgccatgcacgagcgcatctacggccctaggggaagctaccgcaccaaccccgaccacatgcccgattcccatcgcgactttgtggagtgggacgcgaagcgcttccgtaaatgggcggccgggatcggcccgtcctgcggggaagccgtcgatgccatcttgaggtcgcgcaagatcgagcagcagtcctaccgctcgtgccgcgcggtgctggcgctcgcgaagaagcacggaagggagatgctcgagcaggcgtgcgccaaggcctgctctctaacgcccaggccgagctacaagacgatcaaatcgattatctcggagatgggggccgcagggcccgaggaccaaaacgccggagcgtatctgcgcggaggcgactactaccggaacttgagcgagggggacgatgaataatgacggcgagccagacgacgatggacaaactctatggcatgaggatgtcggtgatggcgcaagcgtatcgcgaccaggaggaatcgcaaggagtggcagagatgaccttcgacgagaggttcgccatgatagtcgatgccgaatgggacgcgcgccgcatcaacaggaggacgaggctgttgcgccaggccggcttctccgatcccgaggcgaacattgccgatgtccgctacgacgcggatcgcaagctcgaccgcacgaaactgatagagctgtccaactgcacatggataagaggccaccgcaacgtcgtgatcacgggcgcgtcgggcgccggcaagagctggattgcctgcgcgctcggggtggcggcctgcaacgccttcttcagcgtaaggtacgtccggttgcccgaaatgctcgacgagctgaacgtgagcaagaacgaggattggctcaaggcgaagaagcgctacacgaaatgcgacttgctgatactggacgattggcttttggaaaagctcgaggggaaggcggcgcgcgagcttttagagatagtcgaggcgcgcttgcgcagcgggtccttattgatttgctcgcagttctcgccagcaggctggcattcaaagctcggggaaggagcaatcgcagatgccgtcatcgaccgcatagtctatcggtcggacgtcatccatattgaaggcgacgagtcaatgcgcaagcgcatcggctaagagcataaccggccgtattggccaagaggggcgcttgcgcgcccctcgcaatcagagcaacccgcattgctacgtggcagtctgccatggaacgctgtagcagtggagcgtggaacggtgtagcaaaaacggcgcaataagcaacgagtctcatcagctcctcgcgggaatgggtatcgagcttttggtatatatgcgaggcatgggtttttactgtgttgacgctgaccccgaattcttctgcgatggcttggaggcttttggatcgagccatttcgcacagcactcgtttttcttgcggcgtaagtgcgttctcggctgcaataagctcgcaatacttgtcgaggcatgcctcgaggtcgcttttttctgcggaatcgtcagctgggggaatttcggcaacagttggcgtttcgttggtgctgcccattatggagaagccggcgaggagcagagcataggcgacgaacaagggaaacgtctgagcaaatcctgcgggtaggaggacggttgcttgcgatagattgctgccgattgccaggcctactccgtaaataccgaacccgaaggcgaacgttcttgtgaccgatccgggaacgagggcggcatcgctgaccgtcgtttgccagaaaataataatgtacaagaacattccggctgaaacgaatggcagagcgaagtcgagcgcgccgagtatatccagaaagatcgacgcggtgatgcatgctacggttacgaaccgcagctgaactttcttgaatgcgattgtcgatacgatgccgacgaggacgattaccagcgtcagtgcgatgatcgaggagttgtcgaacggcataagagatcctcgttcgacggaccccctgatgtagttgatggacatgccgaaaatgaagaaggcaagaagcttgtttcgaggagtggcgatttcgcgatctcccgagtgcttttcttcgaacgtgtcggagatttttcggatgcgctgttccgaggcgatgcttgcgaggaaagggatgaggcatacgattattcctgcaactgccgatgccagattgtcgatcagaagatacagcagcaggctgagcaccgttcctgcgaagacgatgaggcgccgatcgcttttcgacgggaaagaggctagcgcgtgcgcgagctgaatggcgtagagaaccgagccggcggatcttgcgaaatgcagcaaactccaatcgagagaagacggatccgcgaaaggccaggaggctgtgaatgcaatttggatggcggtcgttatcgacatgattgctacggagagcacccttatcggagttcgcgagatcgattgcgtcaagaagcgggaaagcaacgcagccgcaaggtagagcgttgctgtggcgagcccgccggtgagccataccgaatgctgggcttccgatgattgtctgaggacgggaaggtagagcagacatgtctgccatgtccaaaacagggaaaaggaggcaattgcgaagaggatgtttcgggaatggccggcgaaacctcgcccccctgttttcagtacacgttcaaacacgctgtgatccaccgaaatcctctcatgcgcaacgggtgagattgcgtaaaagcaatcatatttcacgaattgtggatgacgcgccgaatgatggcaccagccaacattacgttatgccgatacggcggtcaagttgtttgcgcggaaggcgcaaggaggatgggaggcagaaatgttcgaaaagatttcacgtcgttcttttctagtggggggaaccgctcttactatgggtgctgctttgggcgtggtgggttgcgcccctgcgggaacgaacgaagaggcgaaagcttccagcgccgcgattgacggaggcggtgctgaaaccaagggaatgcagacgttgaacgcaggcgcggaactgaacttcttcgagcctgttccgggaaccgttgcattcgttagcgagaagatcaaagacgaggacgtcgcatcgacggaggactgcgatgtggttgtgtgcggtctcggtttagcgggaatcgcaaccatgctcgccgctacgagcttcggtttgaaggttatcgcccttgagaaaacgggatcgtacaacgttcgcggtacgggcatcggcgctccggattgccgtctgttcaaagaggccggggcgtcgtgggatgaggaagagatactcaacgacatgatgaaagcctcgtcttatcgctgtaacgccgacatctggaagagctggttcgcgaataacggtgaagcggtcgattggctgctcgaccaagtcggagataagctgactccgtatctgggccttggtccgaacggcgagactacctcggagtttgcgggcgtggtgacatatcgcgaagacgttcgcttcgaggagggaatggacggttttgcagaggttgccatcgaggttgccaatagtaagaacgtcgacattcgctacaacacccccgcttgtcagatcgttcaggatgacagcggcaaagtcgtcggtgtgatcgctcgcgacgagcaggggtcatatgtaaaaatcaatgcatccaaaggtgtcgttctctgcacgggaggctacgaaaacaattgggatatgatgtgcgagaacatgcgccgagaggacctatgcgtagcggcttggaggcttcccaatacggagaatacaggcgatgggcacatgatgggaatgtccgtcggtgggctgatggatccgtatccccacatcatgatgcgcgatccgggtgcttctgtggcgagcaatgcaggaaacaagggcctcactttgcctttcccgcgagtcaacgaatcaggtttgcgttacgtcaacgagagtatagcaccccacttccttgcgaattccattcagcatcagacgggcggacatgactttatggtgctcgctggtcctgacctggaaaccatcatagaccggtgctcctatcgcaactatgcgatgtcggctgcgcgcatgagcccgaaagaggttgctgatcttctcgagccgatcgcggttcgcggagagacggtggaagagctgtgcgaggctacgggcatcgatgctgaaaatctcaagaagacgttggcgcgccttaccgagctgcacgagaagggcgtggacgaagattggggcggcgatacggagatgttcatggactacagctccggcccctacttcgctttcgaagagtcgggttcgtgcctggtgacggtttcggggctgagggtgacggtcgattcggaggtcatcgataagaccggtatgccgattcccggcctgtacgctgtcggcaactgctcgggcgagatgttcagcgacacgtatccccatgatcttcaggctatcagccatagccgctgcgttgtatttggctatgtcgtcgcgaagaagctttcgcagcaatagccggcatttctcccaatttgcgtcagctgcctcgatggggctatcgacacaacgttggcgagccgaccttcatatggccggctcgcctttgctttatccgagctcgaagagatcgatgagttcctgcttgctgtgaacgccggctttgaggtagatgttcttcatgtggaagcgcacggtgttttcggagatgctcagatcctcgcttatgaacgacacgctcctgccttttaaaagcaggcgcacgatgtccagttctcgttcggtgagtgagaaccgttcgaccaagctgctatccaggtcttgggcggggctggtgttcttgcttttcttctttcgaaaggcatggatgaagccgaggacggacagcccgtatacgatcagcagcgctacgaccaacctttgcgtggttcccagaaggcttgccatgtcgggacatatgatcgggcctgcaagatatccgagcatttgaaccaggtagaacggcccgagcaccccgcagtagatgattgcgggatgtatggtgcgcgttcgcgcggcatcgttgcaggaaagcataaggacgatcgacgagagcccgaacactacatagaacatctcggcgagcacgaagaaatagttgtgttcgatcaggggcatcagcaagacgaccgtcacgcagatcggcaaagcgatctttgagaggatgtccatgctcggatacgagcggaatcgcgcaatgtacagggctgcgagcagtcctgagattatacgtccgaatgaaaacagatttcctaaaaacgtgttgtcggagaccaccagagcgagcgcgtagaaaagcccccaggcaaaacccatggacgctatgatgagtatcgccgtccagttttctttgaaaaacagtgcgaatcgctgccagctttgctgcagaaactctctcgaaggctgctcgtcgttttcgggaatcaggtaaagaagaattcctgccgacagggggagaaaaaagacgatgcttgacataagcacgacgatgtcgggtagccagcgtaccgcgaagtagagtacgcctgcgatgatggttccgcttatctgtattgccatggcgtctcgagaactttgccggtaaagagcttgctgccaaaggaagatgcccattgcgcagccaatgcctatgcatattccgaagaggcttaccagtaccgactcgattgcaaacgaaaaaagcgatgtggatacggcgagcgctattccgacgacgaagcatgcaatcatgaaccacacggagttcttggtggagaatatctttttgtgcccggaaaaccgataggcgactcccaacaagatgatcgcgaggggaaaaacgatgttgtttgcgatggtggtgaaagagtgcaggcttatatcgttggtgccgacgagggtcagaagggagaactgccagaaaaggaacggctgtaggatcatatgggaggtgaacccgatgatgcagattgctcgaagctggctagcggctagcttcttgggcaaaggaagggcttttttgttcgagcgtgtcataagcagtagatctatcccgtcgatgaactgatggtttgttggatgggcccctatctgcggttgtcattgtgaaaagaatgccatttgggcttgcggggtggcgggtgtgcggttttccctcgtcagccacacgacgtttcgccttaacttcagcagcattgatttatgtaggatatcataaagccgcagggccctattgtcgggttgttacattttcggtctgcatatcgagtgcttgcggacgagcgcgtgaggtttgcttcgggttgattttgtgtacggcattctacatcatcgcgtgaaacgcctcgatcagcacgggaacgagcgctgagcagataacgccgttggcaaccgcgagcaccacggtttcgctgttggtgctgcgggacagcatgggcagtgtggtgtcttcgcttgtggctgcggcgggtgcgatgcaggtggggtagttgagatggcgggcgatccagggaatcgtgaacagcgatacgatctcgcgcaaaaggctggatagaaacgcgatcgatcccgccgatgcgcccgcgaaccccgatatcatgacgccgcataggctgtaccagccgagtcccgacgcgatggccccgccgacggcaagcggcattcccagcagcagtgcgcatacgagcccgccaagcagcgagccgacaacgatgccgaacggcacgataagcgcccgcacgtggtattcgcgcagcttcgtgagcagttctctgctcgagccgacgctgatgcccacgaagaacatgagggcgtacaggatgaaatcggaatgctccgatagcgcatcgaggggagcgatgcccgcatgcgagagcccgtagagggtgcctgccgccagcgcgcaaacggccaggatgatcatgatggcttcggcgttgttcttctcgcccttttcggaggcgcgccggtgagcgtcttcggcatggcgtttcgtgatgtccgccataaagtggctggtgagaaagtacacgataacggttgagaagatcacggggataaggcagaacgccaagctggcgatcccgatggtggcgagctcgtccagaaacgcgtcgcgcccgccgagcagggagcccatcgagaagatgagaagcgtcgtgcatccgagtgcgatgttctcgttagccttgcgccagcgatcggggaacaccgtagcgcctacggccacgcccacgcacatgatgatcagaacttccaacgcacctcccttttcgagcgtctgattctatcagaagcctgatgatatttcgataagagcggactgtggatgcctttcgatagggagcggtaggcgatgcggagtgtttggcggtgggcgcaggtgcgttcgtgcatcttgccagaggtcttgtcgtagcggactcgtggaatcctacccatgagccggctgttcaaaaagccgccaacggcgatgggcatgttctcgtgaagaaaaagacgacctgggtacaggtattgtcggttttgtacgcttcgaattccagggccagaacgctcgagtcggaagccgaaagagcctaagcgtttgatctggtttgcttctgatattactaacaggagcttcccccgcgttgtgcaatctcacccctcaaaggcgatctaaagcgtacaaaaccgacaatacctgcactcaagtggctgtttttctcacgaagcgctcgcttggggctgctcggcgactgctgcctgattgattgctcgtcgtgggagtttggaacccctgttttcggctgcaagatatagccgttcgacgtctctccgatttcggcgagtttctctgcctcttgcgcaaacgagctgcggcctcgtccgagcgtatcgaatgaggccgcgattggtggccggcgcgcagcttcgttgtcgaggttgcgagggcgagtcgagcgcgccttcctataggtagctcacggtttcctcgagcggtttgcggtcgaagtggttcttgaggggccctgcgccctcggcggcgtagccgagatcgagcagcatgagcacctcttcgttttcgggaagcttcagttcgcgtgcggcagcagcggggtcgaagaggttgatccagcagctgtcgacaccagcgtttgccgcagcgagcaacatgtgggtggcgacgatggttgcgtcctcgatgccggagtcgcgctcgccgccggggtaggtgaacacggtgtcggtatcgaacgcgacgacgagcaccgttggcgccccgtagcggcagggcgtgatggcgtcgatctttgcaagcccttcttccgattgcacgacgtagatgcgctgctcttgcaggttcttcgccgtcggcgcaaggcgacccgcttcgagaatcgcggcgagctgctgctcgtccacggcgcggccgtcaaacttcttgcacgagtaacgttgcttgactacttctttgaaatccatggctcactcccgttcctcgcaggctgtgtgtgttggttgacatgttacgacggcgagatgtcggtgtccatgctgggggggttcgaaagcgggtttccggaattgccgctggcgtgcgttttcgttgttttaacaacatggcggtcgggcttgcggcggtatagttgaaaaggcatttagcagcagaagtgcagggtgtttcgtatcgcagaggttgtcagatgctgcaggttggcttcgtccgaaaggtggatatgctcccattcgttcccgtgtttgtgccgaacctcgtgcaggtggcgccgttcgttctcgcattcgcgattctgtgcgccaatccgctgcgcaagcacgctggctggttctatgcgctctggacgctcgttgttgttgcagtcacctggtacgatccggtcatctcgctcatgggcgaggcggctcccgcggcggcgttcgcgatggaatcgcagatgagcgcccttccgagcacgatgcctgcgctctacgcgatcgtccagctgctcacctcgtcgtttacgggcgtggcgttctaccttgtcgtgatgttcgtcggcgcgctcgagcgcacgcctatcgtgaagcgcctgctttccgtgcgatcggaactctcggtgataggcggcatcgtcatcatggggcatctcgtgcgcatcgtcgattttccgttcatgttcgccaatcccatgtgggcgaccatatggggaagccctgcagtcgattacatgttcattgcggcggtggttatcgggccgcttctgacggtggcgtttctggttccgtggatcacgtcgttcaaggttatccgtaagcgcatggaccatgcaacgtggaagaaaacccagctgctcgcatacccgttcatggctctcatgatcgcacagggtttctttcttgcgctcgggcatgctctctacggatttccctacgatggctcttcgttcatgatgtcgttcatgtccgatcccgccgcatgggtcggggctttcgcccagcaggtggcgaccgcctggatgtatgtgtccatcggcgttgcgtacctggtgctcaggctgcggaagcgttcgcgcgacaaggcgcggcgggaaagcgtgctgcgggagcagggggccgagggggcttgatggctgcagtcgaccaaagggcgtagttgctctgcgtgggttgaatctcatatgtggagcttccggcgcgttgattctcaaggaataaaagccgcatagatatgggcggctggatgcaaagattgatgtgaatcaggaattttgcctgcgggttttgctgctccttcgcatgattcatgcgaaggctttctatattcagccccgttctgttcttgtaaacggaacaaggatgcgaatcggggaaatcgaactgctgaagagaccacgctccacgcaaacaaaaacgaacccgaaggttcgtctagttgctaaatggtgcgccgtgagggattcgaacccccgacgtactgattcgtagtcagtccctctatccagctgaggtaacggcgcacgtttgacagctcgattattctcccagtattgcgggtgattgtcaaagggtttttcgaaaatgtcgcaaaatgtttgttttcaccattttcccctttcagccgttggtttttgaatcgcacatgtcattcggggtgccggatgcgcaggggtggggttctccgcgttgcccctccccgaaaaacgtgtggttcggtataggagaacgactcctcacgaggtacaatagcccgatatatcccaagggctctcatcgtacaccgatcatattggcatcaagggagcgccgctcactcggcgttggcggttgcgcattcggaatcgagggaagatcgtttccgatcgcggctgctcggtttcgtttcggcgaagcgggaaagacgaaaagcatcgtatcgacgccgtgtcctgcaatcagaaaggggtttggatgaacgcagaagagaggaatttcgcactctacgagaacttccagaaggtcaacgccattgcacctgagtttttcgagcagtacgaggtgaagcgagggcttcgcaatccagacggcaccggagtcatcgccggcatcaccaacatcgccaacgtgcacggttacgtggtgtctgacggggtgaaaactcccgacgaaggtcagctccgctaccgcggctacgatctgtacgatctgctcgaggatgattcgcccgagcgccgtttcagcttcgaagaggtatgctacctgctcctgatgggggagctgcccacgaaagaccagctcgatcgctttgtttcggtgcttgattccgaacgcgagctgcccgatggcttcaccgcctcgctcatcatgcgcaacacgccccccgatatcatgaacatcctcgcgcgctcgatccttctgctctatgcgttcgacgaagatgccgaggatcgctccgcccatcacgagatccataccgccatctcgctgatctcccgcgtgccgcgcatcatggtgcttgcttactacgcgcagcgcgccaagtattacaacgagtcgatgatcatgcaccgtttcattcccggtcaatccactgccgagacgatcctttcgatgcttcgtcccgatcgccagttcacggccgatgaagcccgcatgctcgacgtcatgctgtgcttgcatgccgaacacggcggcggcaacaactcgacgttcaccactcgcgtggtcacgtcggccgacactgacgcctattcgacgtacgcggctgccatcggatcgctcaagggccacaagcatggcggagcgaatcaccaggttctcgccatgcagaaggaaatcaaggcgaacgtgcaggactggtccgatgagggccagatcgccgattatcttgccaagatcgtcaacaaggaagcctacgatcgcacgggactggtgtacggcatgggccatgcggtttacacggtgtcggatccgcgtgcggtcatctgcaagaagtttgcggagcggcttgcggtcggcaccgaatacgaggccgagttcgaactgctcaagagcgtcgaacgccttgctcccgaagtcatcctcaaggaaaagggcacgaagaaggacatgtgcgccaatgtggacatgtattcgggtttcgtgtactcgatgatgggcattcccgaggatctgttcacgccgctgttcgcctgtgcacgtatgtcgggctgggcggcacatcgtttcgaggagatcgtctcgggcaagcgcatcatccgccccgcatacaaaaccacccattcgggcaaacgctcctacgaatcgatcgagaagcgataggaaagcgttctgcggattgccggaaacggagcgcttggaacctgaggcgcccaacgcgatttctgtatcagaagcagaagaagcccccgatggcgggggcttcttgcatgacggggctttatctgcgtttagcttagatcgatggcgacgctttcgtcgggcctccacacgagcgtgtcgtacgtgagtaccgaaacgaagcccttgatcgtttcgtggccgatggagtagtggtcgccgaagaagcggatctcggcaatatcgccatcgtgcgacgcgatgtggggcagtacggcttcgtggggcgcgccggtggtggtaagcaggatcgggcttctatcgcgtccctgcaaagcgccgccggtcaaggcgtcggcatgcaggtcgccgcgtgtgattgcaggtttttcccaggtgaggcgatcgccgtccgagcggtcggcagatgtcgtccatgcggcgatgagcgacgaggtgtcgaagcggtcgatgcctccgagccttacgacctggctgtagggcacgcctgcggcgatgcgggcttcttcggctgcgcgagcgctgacggcgtatgcgtcgccgacgatgaccacgcggtcgaagtcgcccgccgcaagggcatcctgcgtttcctgagtcaaggaggtctcgccgaattcggtcaggaagatgggactgtgcgtggcagcggcccacggcgatatcgaaagagagtctgcgaaaagaccgcagcgggcgatgatggcggtggaggagtggttgccgaggcgctccgagtagatgagctcggcggtctcttgacggtcgacacccccgatccgttcgatctcgctgacggagggaagcgctgcgatctgcgcctcgacctcatcgcttacggcatactcgttgccgacgatgatgaccttgcccgccgaaagggtatcgttgatgacgcggcgcgtttcgtcggacagcgcgtacttgtcggtcaagacgatcggcgcattgccctcgatgcccgaaagcgacgatgctgccagagaatcggggaagtggtagtcgtttccggcggccacgatgatcacgtcttcgtcagcggcaacgcgctcgtaggttgagacctgctcggacgtgccgtagcggtcgtctccgaagagccgtgcgacgttgagcgatttgttcgggcgagcgggttcgttttccgaaacgagcgtaaccggtgtggttctgatgatatgggtgctggttgggcagagcgttacgcattccgacccgacatcgcccgtcctcgttgcgatgagcgtgatgtcggtggcggtcgtcgaggtggtgacgccctgcttgcttcccgagccgtccttctcgatggagcatgtcggcgtgcccgcgtactcgtagttatcgtaatcggttcgcgtggtgattccgtcgaacgggatgacgaacgaatcctgggatatcgtgagcggaacgaggtagttctcggcagcagtcgaagcatcggtcgcgtcgatcgtcccgttcggcacgtagagagcgccgtgcgttgcgctccagttgacggcgtacagttctacgtctgacgcgcggatgatcacgtctccctcgggaacccaaagcgcgcagcagccctccgattcggttttagccgtaatggacgatccgttttccgcgtcggcgccgtagtacgcgctgatcgcgctttgctggcgcgagtaggcgtcgaacgtgccgttgtcggcgtaaatgaagtcggaatcgattgcgagcgacgagtcggaagcggctttgatggtgccttcgaacgttgctccaacggtaccgtaggagcagattccctgaccggctgtgccggtggcgtcgatcgtagcgctgctgtgagcggttacgttgcccgaagcgtagatgccggcggaaaactcgttgccgtctgtttcggtggcggttgcgatgacgcttgtggcgctgcccgttgccgataccgtaccgtcgtcgatgcatatgcccgaagagagtccgcttgccgtgacgtcggctccgtcttcggcgttgaatgcgcccgtcgatcccgtcgtgcggatgccgtagccgctcgatccatcggcgatcagagtcgatgcggagacgaagatctcgttttcgtcgaatgccccatggatgccgtaggttgttccgtacgccttgaacgtcgatccgtctgtaacggaaagcttcgcaggcgatccactgccaaccgacccgttcgtttcaagagcggtttcaagtgtggttgccgattcggttccgatttcgacgatgctgttcccatcgacggtgaacagggcgccctgaacgttgattcccacatcgcccgtgccggtgaacgtttggttgatgagaagcttcgacctgtcggtgaccgagatgtcgttgacggcgttgatcgcccttgcgctgtcaatcgaaagcgttgaggctccgtcgactacgatatcgtcggcctcaagggctatagggttgccgctgccggtgttggcaatgcttgcaaagccgccgtttacgatcttgacaagcgcatcgttaccatagccgaccagcgatatggatctgctggcgggggaggaaacgttgagcgttccaccatcgacgaccagggagtttttgaggtcgacgttgctgcttgcgcccatgccggtaagcgtgaggcttcccttgaccgtcagatcggttccgctcagcaaaagcgatgacgaggtaaccgaaagcgagctgccgctttcaacggtaagctcggtggcgctgatcgccgaaacccatgacgtgtagtcgatggagacggtcgtgttgtcggcaatggttacggctgaggctgccagccctgaaaagtatcccgtgttcgaatctctaatcgtaaggtgcccacctccggagataacggaggggccgacaacgttgcggacgacggcgttatcggcgatcacccggagctcgaaggtcccggcgcatgtgattttggttccagcgtcgtattcgccggctgttcccgtggggttgctgtcaaagtagaacgcggtagggcttgcaagtacaagagtgtcgcccgaaggaacgttgatctcggcttgtgcggtcaaaggcgagatcggctcagatccgctttcggcttgcgcggccgaaggggcgattgcttcggatccgctttcgttttgcggaaccggttggctttcgttcgcgtaggcaggcagcgtacttgttgcaagcagtgccgccaagacggccgaaagggcaaatccgaacccccgtcttgtcttgattcgcataggcgtctcctctgatagcatggcgttctcataaaaataataacttacatatttgaaaagtataagatcatatgttactaaagtcaaagcatatatcgagaaatagataacatattttataattctggagaaatcgacaagcgccagcgggaaaatgcctgttgcaccgccgcccagccgtcgaaaaggggacgcttcggcggcgtttcgcgcatgccgaagcgttgcgtgtgcaaaggagcgatgctttatactctatcctgtgatacaaaatttctgacataggcgaaggcaggcaagctggtttatggattttcccacgacagtggtcgaggtaattaaaaggcggttcgaggagacgaacggctgcaaggaattcggcggttgcgaaagcgaagccatgtcgccctactacgtgatgcatctcgaggacaaccttgtcgagcagatggcggagtgccaccttcgcgagtacgagcaaggcattggaatcgagctcggcgagaagatgcgcgcgctcagatcgtcatccgccatgacgttcaacgtgctgggcaacaagcgggtcaacatcatcgattccctcctcgctcccaaagggtgctattcgatcaattacgaataccagctccccacgctgaaaggcaaccccaacaaggcgaacctcgatgcgcgtctcacggccgaaaacggaaacaccgtcgtgtactgcgaaatgaagatggccgaatggatgctcggctggatgaagatgctccgcgtatcgtacctggatcccgaccgctaccttattccgcgcgaagacgccctcgtgttcatcgatctgttcaacagccttgtcgcgggcgatcccaattggaagggatctcggaaaacgaggttccaccgcttcgacgccctgcagatggcgaagcacctgctggccatctacagcaatctcgatcgggaaaactgccgggccgtcaagctggtcaactgcatatgggaggttcgcgaaacctcgctccttgcgccctatgagcgcaaatacgaaacgtggctcgcaacggagcgcagcgagttcttcgaattcgttcgggcggcgcgtcccgtttacgatctcttcgagaagcgtggcttcgatctgacgatcgattacatgccggtcgaccgatttcttgcctgcctggagaaaaccgatgagcagatgcagaagcttgcgcgctacatcctgtgattcggcttgcacggtgtttccagctgctgtgcgccttcgctgcaaagtcgggtaaagcaagtcgggtatactgatgaaaacccgacgatggagctgagtgccatgaggatcattagctttggcgtattcgaattagccatcctgattgccgctgtcgtggttgttcttgcggtgatcggcatcgccattgcgctggatcgttctcgcaaggcgaaggctttgcgccagcccccctcgtccggttggctggccgcgtcatcggggcggcaggagtcggcgtccttcgactggtcggcatcggaggcgaccgatcaacggccctctgcggcagccggtcggtatgaagcctcgacggtcggcccgcaaccgggcttttacccttatccgtccattccgccgaagcccgatgggataatcatccgtctttggcgtgcgtcgtaccccgttctccttatccttggcgtgcaggcgctggccggccttgcgctcggcgcccttgttgcggccaacccgtcgtttgccggcgtcaacgactacgatttcgtatggcttgtccttatgggggttgtcgtatcgcaggtggcggccgtcccgtttttgatcgcattccgcattatggacggcaatcggcttcgggcgaaaggtgcctggtcggaatttcgctttcctgttttctggaagcttctgctgtgcctggctttgggaatcgccatggcgtttctcgctctgagctctttcgagctgatcggattcggcgacgatggtacgcagtcgatcgttttttcggcgcatcccgtcatatcggtgctcgttatcgggatcatcggtcctgcaaccgaggagcttgttttcagggttttgctctacagccgcttgcgtgaatggatggcgcccgtttccgcaggtctgctgtcagcgctcgtgttcgcgcttgcccatggcaatgcgacgcagggcgtgacggcattcttctacggacttgcgctcgctttggtgtacgaacgctacaagacgttctgggcgcccttcctgttgcacgccggaatcaattcgacggtggtcatcgtggcggttgcaggccgcagcttgatgtcttcgttgtcggatccagggctttttttcatcgtactgctgagtgcggcgatcgttgtcggattggttgttgcggcgtaccgctcggcgcctgcggaaaagaagatgcctcctttcccgtaggcttgcttgcacggtgtccgagcggccggaagccgcacttttcggcaggcgatgtcccccgcctatttatgtaataacatatataatatggagaaaccatggacgcgggcacgtatcggttgttttcgcgacggaaaaatcgattttacccatcttattacttaggaaagaaaaacgtacagggcttcccgacccgttcggttcgaagcgggggtcggaagatgcgaggtgcctgatgatggaagaaagagagacggcgtatggatgctggcgattgggatcgtgtcgatgcggggttgttgtgggacatattcggcattcattctcagataggagctttgctcagatcggaatacggcgggcttaagggctacgagattgcgatgctcttaatgctctgcacgtcgaaggagcctccgtcgatcggggccatcgccgaagccctcggcgtgacgtcgcaatatgcttcctcggtttcgacgagccttgtcgagcggggatacgcggaattcaattggggcgaatccgataggcggtgcaaattggtgcatctcaccgattgcggccggtcggtgtgccgggaaaggtttctcgagccgggcggcgcagatgatcccttctcgcttcggtattccgaaaacgatctcgatgcgctctctgccctgcgtcggcaagtgggcaaggcggctgaagcgttcggcgcttagggcgcgggtgagggcgtttctgcgaaagggcatccgcgtgcgccctgtgccgaaatcgcaaccaagcagaaacggctcgtcaatgatttgcgtttcttcccgatagcgaagcttccggatgatagaacgagatgcataccgaaagcgaaaggcaggaaaccatgtatgcggatctgaagggaaaagttgcggttgtcacgggtggctcgaaaggactcggctccgccatcgccatgcggttcggctgcgaaggcatgtcgatcgtcgtgaactaccataccgatgaaggcggtgcgcaaaacgcggtgcgcgccatacgggatgcgggagggagagcctgtgcggtccaagctgacatcggttcggaagacggtgtaaggcgactgcgcgacgcggcaaccagcgaatacggaagactcgatgtatgggtgaacaacgccggcatggaaaacaggtctccaaccgacaagctcgcccttgaggattggaatcaggttatcaacaccaatctcacgggcgtgtttctcgggtcgaaatgcgcgctcgagcatttcgttgaaaacgacaagccgggctgcatcatcaacatgtcttcggtgcatgagaagataccgtggccgaccttcgcccactacgctgcgagcaagggcggcgtcgagctgttcaccaagacgatcgcactcgaatacgccgaccgcgggattcgcgcgaattgcatcggacccggcgccatcaacacgcccatcaacaaagagaagtttgccgaccccgaacaatacgatacgaccgtctcgatgattccgatgggccgcatcggcgaacctgaagatgtggcttcggccgccgcatggctcgcgtccgaagaggcgcgctacgtgacgggcatcacgctgttcgttgacggcggcatggcgttgtatccgtcgttccagtacggaaacgggtagggcgaatgccgtcacgatagatttcgttgagctggtagggccgtttcgagcgacacttcgagcggtccttttttcttccagataggcgcttccagcaccgttttggctattcaaagccatgatcgcgggaggatattcgcgcgggaaaatcggggattattctccagaacaagcaattcatcagggaaaacaatctgctctcttgtgcgctgtgcggcaatacgcaagtacttatgcaagaaattacaaatttttatatatgagattacacttctcccaataaaatggtatccttctaatatcattgctggatacatgcagaaaggaggagatgacttgattgccacatcagcaggggatggctcttcaaaaacggctatcgctatgaaaaagagcggatcttccaaacagccggcgcgagctttagccattttgctcgccgtgctgctctgcattaccgggtttccccttgtagcgggaagcgagcgggccgaagcaagcgagcgcgacatcacggaatcggttgaactcgaattgacgcatcaggcgttggcagaggacggaacatgggtcgacatcgattcggctcaaatcgacgccgaggccggcgataatgcaggcgcgtatcgcgtacagctcaattgggctctgcaaaatcaagcgcatcgagtctcgaacggcgactatttcgtctttgaaattacgaattcgctgggggggggggagcttaccgcgaagtaattttctagactcgaacggcaattccctcggctccgtcgagatagacgaaaacggtgaagcaaaggcatcggtcaccgaactcgatggcagcgaatcggaacaagaagtatcttcgggcacggtagaaatagaattcgaacccgaggcgaccgtcgaagacggcaccgaaaactccgaggcaaaccaggaaggcgaacaggcttccgaaaccccggaaatcctaacgccgcaatctgaattgatagcggctccccttgtaaccatcgcgccctatggcgcaggcagaggcccgacgggcgatccgaacgatgccggcacggtcggtcagatttctctcgtcaagttcgaacagcttgccaacggcgccatgggcggcatggccctcgacgggtcgggccgcgtctggacgttcgggtacaacctttacggcgagttgggtatcggcaagaactcgacccagcagatgtactacggcggcatgaagcgcgttccgtacttcatcgaagaaaacatcaacatcatcaaagtcggggcgagctaccaaactcgttttgccttgagcagtgcgggcgaggtgtacgtttggggtcagggctcttcgggcgagatgggcgacggctcgacgaggtcggagaactccattcccaaaaaggtggaaggcctgccgaagatcgtcgacatgttcgtgagcagctcgtacgtgtacgttaccggcggggcagtgtttgcccttgccgaggatggcaagctgtatgcgtggggttacaacaacggtggcaagctgggcgtcggcaccacgacgagctttgtcacctcccctcgggaggtggatctggcggctctgagcccggaattcgccagcggagagagaacggttgtcaaggttgcgaccggccgcgcttcgtctcatctgctcgacagcaaaggcgatctgtgggctgcgggactcaacgggtacggcgagcaggcgggcacaggcgcctcctctacgttcaagaagatagatcccagccggttcgatggggcggccatcgtcgatgtggacaccgcgtacaaccttgcggttgcaggggaccgcgttgtcgcagccgatgaaaacggaaccgcatgggaatggggcgccaccaccggcgatgcaggcgacaagaacgccacgatggccaaaaccgctccccaaaagatcggcatcagcgcctccgagatcgatgcgtacggctacacccccaaagccgtgcaggtcacgtcctccatgcacaacggcgtgttcatcgaccagcacgggcgctcgtggatgtggggcaacggcgtgtactacggcttcggcgccgaaggtggaaacatcccccactacacgcagcaacgtgtttacagctctgcagccgagcagtggcccaaggtcatcggcgacggcgatacgcaaagctacgacacgagtgacaagaagccggtgtatctcggtggcggaaagacccagatcgcaagccatcgcagctacggcatcgatgcgcttcatcccaccatctacgatgagaagtacatgatgcgcgacgacgatggctacattctcgacggcgacggcaaccggatcaagtacgcaaccggaacgacggtcgatggcgtaaacggccttaccaccgggaaatactatcttctcgacgcatcgaacaagatcgacccatcgaggacggcggctatccctgccatcaatccgaccgatgccatgtggatcaatctggcgttccagtcggttccctacatcaagacgttcgacatcagcctttcggcgtatgcgattctcgataccgatggaaacatcttcaaatggggctacgacggatcgggcgcgatcgcctggggctgggattgggagcagaaatacgacggaacgccgtacgcttcctcgagcgcccaagttggtttggccgaccgctattgctacgaagtgatgtacatgcgcggagctccctcgatcgacatcgtcgatttgcaggcggggctcaaagacaacgtgaaggtgtacaaggatccggtaacaggcgaagtctccaacgttgccgaagtcaagctccaccttcccaagacagtggcgagcgcagagcttgagtcggacgtccacagcgacgtcaccgagctcaagtacgttatcgtaccctacgacaccgacgatcccaacttcgtcgtagacaatacggccatgacgtacgagcagttcatggcgatctacaatgctgcagccgatgggagcaagggcgatctcatttcctcgccggtgctttcaggctcggccgagcagaacctgacttacgaggtcgacgtccccgataacgggcgcgtgatcgtgtgggcggtcaacgatcgctacgtcgacggcccgaacgggacgaaggaataccagaacatcaaccatgtgagcgctgcgttcgtggccgacaacgtgtacacgcccgtctcgatgaaccacaagggcgtcggcgtcgaccccgaaggtgcggagaccgagctgtacgcatcgaccaccgataatgtcgtgaagacgaacgatgacagcagccatacgcagaagcctttcgacgaggacctctacggtttgccgctcgatgccaatggcatggcgatcggtacgagccgcgacggtgacggcaatcttgtggtcgattccgatgcggcgccgacgtacggctacgatacgacttcgatcaaaagctacgaagcggttggcgatgtggggcttcccgcgggcatcaagccgtactggaagttcaaaacccacttagacgatgcccaaacgcaggttcagcctacgacggtttcgaaagacatgaacgacgagaagctgctgcaaacgggatacgcccataccttctactacgatcaggatccggactactggacgacggtcgagggcgaaaagacttgggaggattccgacgacaggctcgggttcaggcccgatgaggttacgctgacgctcaagcaatacgagcgcaatacgaccacgggcgcgaagggcgcgttcatcaaagatgtcgaaacgatcacgttcggcgaggatgctcacggaaagtggccgtttagtttcggttcgcagaaatcttacgaatacacctatgagatcgtcgaacaagagatcccggtgtacacgacctcgatcgcgtatccgaactttgtcgtcggctcggggaccaacgaagattttagcggtaccagcgtagtgaacacgcttaacttgaagcccgtgaagctcaacaaggtggactcggcgaagaatccgattgtgaccgatgccgcgaagttcgagcttaccagtgcgactgcgggcgaaaaagttctcgatgagtcgggagtcgagcgggatagcatcgagctgaccacttcgttgctcaacccctatatcgtcatgcccattcagaaaccgggcacgtatcacataaccgagacgaaggcgcccgctgggtacaacttgctcactatgccgatagaggttgttatcggcgccgatggatccgttgcgtcaacgcttggagcggtctcgttggaagaggttgcgctgagcggcagcgatgcggatcgctattcgaaagcgtacaacgtcgtgaacaagaccgcttccgaattgccgaaggcgggcggtatgggaacgatcttcctcaccttggtgtcgaccgcgattctgttcgctgcggcgtttctcctgcggaggagaagccgagtagcgagagcgtcggtgtgatgcatatggataagccaatcgatacaacaaccatcgagctctgatcgcgatgagaaggaggtgccgttcgcccaattatgtaagagcatatataaatataaccagcgaacgaatagataaagaaggaggaggacgtctatgaaaggcaaacgcctgataagcatgctttttgcggttgctctgacattaggtctggtcccggcgatagcgtcggcagccgatccgatcgcaaccgatctcgtcatccacaagatgcaggttgagacgggtaccggtctcgagaaccacgacggtaccgagctcagtgacttcactgggacgaacctcgaaggtgcgaccccgcttgcgggcatcatcttcaagtactggaagatatccgacgccgccaccccggtgcagatgtccgagatcaagggtctgtcgaccattgcagatatcgaagcctacgtggccgccaacccgacgatcctgacgggtggaaccgaaaccgccgcatcgagcgctgcgggcatcgtcaacgtcaacggtcttgcggagggcaaatacctcttcggcgaggtcaacggagctgccgagaacgtgtccgagtacatcggcgtgccgttcttgctcgagctgccgcagatgaaaaccgatggaaccgcttacttcggaaccggcgccgatgcgcttcacgtgtatccgaagaacgtgaagaagatgcctggactcgatgtcgagacggtcaacgcttccgatgcccgcatcggcggcggcgagttcctcgtgcagcagtacaactccgttaccgatgcctatgaaaccgtaaccagcatcggaacggcgggcacgatttcgcttcctagcggcttcatcaccttggccgatcttccggctgggcagtatcagctcgtgaacaccgttgctcctacgggctacgtggtcgatgcgcgccctgtgggcttcaccgtgtctgccggtacgatcacgttcgatagcccgaacagcccgatggcgtcgttcacgcctgcttcgggaaccgacaatccgatgatcacgatcgagttcaacgccaagcccgatgtgtcgaagaccgaaggcaacggcggtacggagcagatcggcgaaaccgtcacatggacggttgccatggacgttcccgttctcatcaaagattacgtcaagttcggaatgaccgatacgatcgattctcgactcgattacatcgccgatagcgttgctgtctccatcggctctaccccgcttaccgcgggcacgcactatacggtggattacaacaccaccacgcgcgtgctgtccattgcgtttattccggcttcgcttgatgcctacgaaggcgagacgatcaacgtttcgtacgggaccaagatcaacgaaaccgccatcatgggcgaagagatcccgaatgacgtcgagcttgctttcgacaacaactacggccacatcaccgaacccggtgagattaagccgccggttaccccgacggtttggacgggcggcgcccagttcaagaaggtcgacggatccaacaccgccgtcgttctcgaaggtgcggagttcaagatcgcgagcgacgctgccggtaccgtgttcttgacgtggacccaagacctgatggatgccaacgatctgagcaagttcgtgacgccgacggttggcggggacatcaccctgaagtccggcgcagatggcctcttcgagatcatgggcctcaagggcggtacgtactacctcgtcgagacgaaggctccgacgtacaacggaacgcagtacaacctgctcagggatcctgctgccttcgaaattaccaagacgagccatgaggacgccagcgctatgcaggttctcaacaattccggcctgcagattcctcagaccggcggcatcggcaccgtgctgttcacgatcgtcggtgtagcgctcatgggtgttgcaatcgccctgttccgcaagaagaaaggccctgcagcggccgagtaaccgattcagctgcacgaataacgttatcggaatagcccgcacgagcgggctattcctccgaaggaggattgaagagatacagcgatgaaagccacgtcgtcgatacgttcgcttgttttgagcaagtacatctacgttgccatcttcgtgatcggcgcgctggctttcgcgtatccgcttgttacgagcatgatcaaccttcagacgcaaacgcgggtgatctcgaactacgagcaagagagagcggcgctcgacgaggcggaaaagaaacgcttgcttcaagaggccgaggaatacaaccgtttcgtagccaacctcgaaggcaacgttaccgatgagatgacgcccgaagagcaggcggcaacggatgtcgtctacatgagcgtgctgtctacgggcgaagcgatcggatacgtggagatacccaaaatcgaggtcgatcttcccatctatcgcggcgcaaccgacgagatcctcgagcgcggcatcggccatctcgagcgcagctcgcttcccgtcggcggggaaagcacccattcggttctgaccgggcatcggggcttgccctcgtcacggttgttccgcgatctcgacaagcttgaaataggcgatgtgttcatcgtcgattctcttgagggcaagctcgcctacgaagtggaatccatcgtttcggtgcttccctacgaggtcgaatctctgaggatacaggaggggcgcgatctctgtacgcttgtgacctgcgatccgtacatgataaacagccatcgcatgctcgtaaccggccatcgcgtcgattacgttcccgagctgctcgaggaagcctcgcagaataaaatatcgttttttgaaaagtacatcgaatactttctaatcgtcgggttcttcgccgtgctcatgctgatcatgtggcttatccgcgtgatccttcgcaagaagcgcgctgatcgtgcaactgccgattcgccggcgggcggtgaggaaattgggtagggcaccgatcgtcaagctggtgttggcggcatgcgtgttcgtcgccggtttaggtgtgtttctgtatccggctatagcgggtttcgtcaacgagcagtcgcagacgtcggccatcaccaactacgaagaagccgtcaatgccctgacggctgaggacaaagccgattccctcgaagcggcccgttcctacaacgaggcgcttgccgaaacgcagggcgcgatcatcgatcctttcgggtctgcgggagacgaaggggaatcccaagaagtgagcttcctatcggtcggcgaggtgatgggctacatccaaatcccggaaataggaattaaggctccgatatacgaagggacgtcggaggacgttttgcagaagggcatcggttggctcaaggggacctcgctgccggtgggcggcgaatcgacaaacagcgttttgacgggccacaggggcctgccgacagccaagttgtttaccgatctcgatcagcttgagccaggcgatgagttctttgtgaaaaactcatcggagattcttgcgtatagggttacggagaagaaggtcatcgatccaagcgaatcggatgcgttggccatcatcgagggtaaagacctcatgacgcttctgacctgtcatccgtacatggtcaacagccacaggcttttgatcatcggggagagggtcgcctataccgggcaactcgatgaaatcgccgaaacgtctggattcatcgagtcgatgacggcagcggagaaagatctggcgcaggcaggcctgcttgtcgccgcatgcctggtgctcgtcatcgtgcttgcgtggcgcccgtggtcgagaaagaggcgaggcgaaggaggccgtgatggataaagccgtcagaggcggtgcgttttcgtccgagcgagagcgtcgaggcgtcggtgcgcgttgcagttctgccgtcagccgaacgcatcgcagagagggtccggtcgggccgtcccgaaattcgggaatgccttcgggccggggagcgaatcgtgcgaaacgaagcgctgcccgcacgattgccgccctgctgatgttctgcatgggattcggcgtcctcgtgtacccttacgtcgcccagcggatcaacaacgagagcgcgacgcggctcgtcgctgcatacaacgaatcggttcaggctggtgcaggcgggcagtctgacggcgagggttcggatgtggccgcctatgcggcgccgattcccgacgagggcgtatacggcagcatattcataccgaagctttcgcttgagctcccgatattcatcgggtcgaccgacgccaatctatcgaaaggaatcgctcatctcgaaggtacgtctttgccgacgggcggggagagcacgcattctgttttggcgggtcataacaatgtggctacgaacgaatggtttacaaatatcgatcggctggtagaaggcgatctgttctacatacgaaacggcggcaccgtgttgacgtatcaagtggtgtcgacgcagatcatcgctcccacggatacgtcgaccctgctcattgagcgggggagggatctcgtgacgctgctcacctgcaccgattcaggtgccgaacgattgctcgtgacgggcgagagggtcttggaccaatgagacgcttgagggcgcgcttacaggaaagataggagttgtctcatgcagtacgtgtgggctgtgcttgcgctgatggtggccgtcattgcgataggctcgatcgtctgcttcaggcttatcaagaacaagcgccagaagaaagcggcaatcgcggcattcgggtatttggcttttgccgctgcgctgttctacatcgacgttgtgcagcttgagcaaagctgggcggtgccgatatacatcgcctgcttcatagcggtgccccttgcggtttactacgttgtctacagtcttgccaaaacgtcggctgaaaacgcgaaaccgaacgccgtcgtcgtgccgaggggcccatcgagaagcggttccgaaagcgattccccgcggacggtggcggcgaaagctccgttcgttgtcgatgtcgaacctgctgcggcacctgcgagcggtcggcggcctcctgcggcgcagaaagccgttgcggcgaagagcgcgctgccagacgacgagaacaaaagggtgttcgacgagcgggtccaatccttcaagcagcaggcggttgcgcgggaacagcgaatcgacgagaccgaaaaagcacgtaaggccactcaggagaagcgcgctgccgcttccgctgcggcgcatgaggccgcacggccgatcttggtttccgattccgaaaaagaaactgccgtcgcaggcaagcgagtgaagccgacgagtacggaagcgccgacgagtacggaagcgccggcgaatgcggaagctccgttgggcagagaggtgtcgatgggcaaggaaacgccggcaagaaaggaagcgccaaagaccgagcaatcaccgacgggcagggaagcgtcgaccaatgcatgcttcgaagaaaacgctgcagccgtcgcccagccgatcgaaaccaagcaggcggaagcggagaagctgagcgagccgagcgcctacgaggcgtatcggaagaaggcgatatcgctcaaggaaaagggccatgcggcgatcgcagccaagctcttcgccgagagcgctgccgttgcaaccgatggagacgagcggaaacggtctctcttcgatgagataaccagctatatagcggcaggcgataagccgaaggctcatgaacttgcccgctccttgcgtgcgaacgagatgctgacttccggcgaaacggcgaaggccgatgcgctgctcatcatgctgtcggacggaaaggcgggttgatggcgggagcgcgggcggcgaaagattttgccgggtcgttgcggcatcgcatcggacatcggcagaaggcaagctcgattttacgatcagacgaaaaccaacagcaagcacagcgcggaatccgctgatcccgcgcggcttgtgagaaaggaacatcatcatggaaaccaacaagacgattcttctgcgcgaagtggtatcgatcgaggacaagaaaacgatcggcgccgtgaaagatctttgcgtcgatagcgaaacaggaaaggtaagccactatatcatcggcgattcgggccttgggtcgctttcgatacttccgcgcgaaaaggcggtagcggtcggcgactcgtttattacgattcgaaaggacagcgtgcttttgtccaccgacaacaaatcgggaaaatcgttggttgacgatggattccgccttgttgggacagaggcgtattcggatcagggcaatcgcctcggctcggtgacggctttcgaattcgatgcgaaatcgggtgcgataacgatgataacgctgagcgacggctccgaatatgcggcaggcaagattctgttcttcacgccgcgctacgtgttcgttgataaaaacggcgtgcaagaggtgtcggttggctcgtcgaaagagccgtccgagccagcggctccgaaggccgattcggcagttcaggccaaacccgacctcgattcttcggacgacgagaacaaggcggttcgagaccttttggttggcaagcgggtttccgagaacgtggtaagcgcagatggcaggttcgagctcgcgaaaggcgaaacgataaccgaggaaatccttgcccgcgcccaagagcatgacgcgttactcttgcttacgttgggcgtcgaagtttaaggggcctgcaaaagccgaaccggctttgctcgcttgctcggcttttgcggtgcatcatacgaaaggagcacgcgatgctgccagagacgatgtcgggaaacgagatcgaacgatcagccttggaaaaagtatttgatatgaacagcagcatcgaacgcttcaagaggtttcctttcgatcgaagaataaccatgaggcaagcgcagctgcttcatagcctgtggtcgcttgggcatcctccgaccctctcggaaattgcggagatcgatcggtccggtactacgcaggcgtgcaggcagttgacataccggctggagcacttgggctacattgcggttgacgtcgatgagcaggatcgtcgagcagtccggattctgctgacggaagacgggagcaaggtcggcgaagcgtacgaaggcttttttcgggagctaacctcgctcatatccaaggatatgagcgaggatgaactgaaaatcgtagcccgcttccttgattcgttcataaacgtgctcggcaaaaggctgcgaccatcgtagtcttttgcgctaacccttgttgcgatctgattctccgaacacgaggtccatcatgccctgtcggccgctgacttccattttggcgtaaatatgcgacatgtgcgttttgatggtgctttcggctaatacgagctcgtcttggatgaacgagcaggtgcgtccttgcgcgagcagcatgaacacctcggtttcacgaggagagagcccgtactcggcggcgatttcgcggcatcgttcggtgatggtgtgggttaggcgcgaaacggaatcctcggtgtccgctgcggtgctgcgcgtttctgcggaatcatcttctcggcgcttgaacaggctggaaaaccacgagcggttcataacgatggctacgacaatgaggatcacggtcgtttcgacaacggcgcttccgcgtaaaaacacaacccatatgatcgagcttgccgcatacacgagtccgggtatgccgatcgttctgttttcggggatgtcgagcgtcggaatcgcagcggcgatggccgaccagaacagaaggtgggcaaacgggtcgttcgcctgcacgatgctgtcgagcaacggggagggctcctccccgagttgcgcgcggatcacgacgacgaaaagccctgcgataaccacgaggatgggcagctgaaagcggatcgaggcgggtttcttcgccatgagcagcagcgtgatctgcgcgaacagcacgaggcagaccgtcagaaccgagatggcgggaatgcgcccgagcgcgtcgaaatacgtggtgttcgaatcgccccagacgcccgagggtccgaaaatgcgaaccattgccagcagcacgccgacgatgacgagtacgataaccgtgtcgtgctcgctctgcgcatggcggatgctctgggtgggcgcgtcctgcctgagattttgcggtgccggattatctgcagctgaggtctgctcgatcggttggtcgcgcatggcgaaacgggcggcccaaaggaacagcgccgagaggaacggaagcgcgatggctacgatgacctgctgtgccggatcgaggaaactgtcgagtcccaagctcgcaagctgacgcaacgggaaggcggctacgatgcaccagaccgccattgcgaatccctgcgccttcgagagcatggtaacgtagcgcgaggcgaaccagaaataaccgagtcccgcgacggccaagcccgccgttgcaagcacggtggggtcgaagaaatcctggttgaacgaaagggcgaagcatgccgtgcccacggccgaaagcaccggcatgaggtaggtgaggctgcgttcgcgttctgcaatctggtggggcagggcaacgaacaggatgctgatgatgagaatgccgagcagccaaaacgtgcgtgcgttcacccattctccgaggctcagcgacgagagcatgaacccgggggtgtgccccataagcgtgcaccacagcaaaatgagcgaaagccccagtgctgagagaaccccgcaggtaagcgaggtgcgacgttgctcgttcatggttttgtttgcccccttcgaatcgaacagcagtatagcgcacaagagggcccgtgggcgagcaggtggcgatcgggcgactgcatgctccgattaacgccgtgcgcatcgatgcatcgcgatacgggggatggcggcaggcaggacgcgtcatgccgcggatgcgcattcgcacgcaagcagcatcgcccgccgaacggagcctgtgttcggcgggcgatgtgcgtgagacggacgggatgcgggtagctgctataccgatacccgcccgtcgggttatgcgatttcgaatgtgaggcttgcggagagcggcgacacgataccatccgccgtgcgggcgcgcacagccatctggtagtcgcccgcttcttcgaagctcgtggtgaagtgccagttcacccacttgtcggcggtggcgccttccgtttcgcacgccgtccaggtacggccgccgtcgaaggagaattcgatggcggtgacggggctgccgcaatcgtcggcgacgccttcgaaggtgatctggtcgccggccttgaaggtgcatccatcggatgagttcttgatctcgatcttgttgcggtaggtcgggtcgacctgctgcacctcgggcacggcttcctcgcgggtgagctcgatcgaagcgatgttgcgcgtgaagtagcgcgccaccgtctcgggcatccacagctggacgctcgagccttccgacgatttcagctcctgcccgttgaccttgtacacgagcagtgcgttcttctcgagcgcgtactgcaggggcaggggctggccgaagccgtcggcgccataggcggtgatggtgttcacgccttcctcgaggtcggccatgccgatgaccgatgcgagcggtactccgatgaccgacgcctgcccgaaaggagagcccgtagcgcacgagcagcccatgagcatctcttgctcttcgccgtcgagctccgacaggtcgagcgtgaagctcttctggatgttgccgcccacgttgatgtagtagttcgcaacgcccgtctgctcggcttcgagctcgggtgcgggcttggagcacatcgaaaggatggcggttccgaatacgttgaacagctcgtcgttgggcgtgacgccttcctggtcgaactcgaaggtgccttcgacgttggacatctgcttgtatggggcttcttccccgagccaggagcttgcgatgtcgaagtcggcgacggtgtgcacggttcccgtcggctcggtttcggtctcggcgaccgcgggtgcgaggttgccgaatgctgcgcccgcaccggaggcgaggagtaccgccccggccatcgaggccatgatcttgttggtggttttgctcatgggatctttactcctctccctctactgcgtcagcgacgaccttggggcttacgagcgaagcggtttcgatgacggtggtctggtcggtctcaggcacggtgtctttggcgttgaccatgactgtctggatgtaggggctcacgagcccggtttcggtggtggcgcggatctgaaggcagtaggcgctttccgcttcgggcgtccaggtgtaatcgaaccagatgagcttgttcacgtcagtgtcaccgagctcgtatttggtccaggtcgctccgaagtccatcgagaactcgacgctgacgatcttctcgtcataggcatcgacgtagccgtggaacgtgtagggttcgccgttttggatgataaggccttcgggcacgtcgaggatggtcgcgttgggcttgttcgtccagttgccctcggcgtcgatccagccgttcgggttgccgtcgtgatgctcgaactcgtagacgtgatcgttgaaatcgggggcgtcggtgaccaccttgtactcgttcatctgtttggagttaacctcgggatctactccttcgcaccagttggtgcaggggaatccgtttgccgccgtcagccgctcgccgttgatttcgtagacgaggaacgcctctccgccgtcgactttctcaagcggcatcgcgcgcttggaggatccgtcggcgcgcatcacgcgcacgccgttgatgtcgacgccttctttgtagccgcctgccttctcgatgagccagctgacggggatgccggtgatctcgacgttgctcacgctgcctgcgcctgtgccgttccagttgcagacctcctttgataccttcgtgaccacgacgcctgcttcttcggcttctttcacgaggtcgggaagcatcgcggtgtaaggttcgttcacttcgccgtcgacggtgatgggccaactgtcgaagaggctgtcgggcatcggggtgtcggcgtactcggcgccggagcgcatgcggtcgtacaggcggttccaggcatccatgttgaacatgtcctcctgctccatgatcgtatcctgatcgatggagaactcgccttggacgttttcgaccttggttacgccgcgcaggcgctcgaacttggtctgatcccaaagcatcatgcccaggccgtcgttggtggcgtcgtggcacgagtagcagttgccgttgtactcgtcttcgaattcgtcggcgaactcgatgccgtagtggacgttgtgcatgagcgtgccgaactcgtactgggtgggaatgtagccaggcgagtaggtgtggcagaacaggcactggtcgaccgtcatctcggcgttgaggatctcgctgttgggcgaggggtgcatggtctgcgagaggttctcgagcagcttgttgaggtcggcgtggcagctgttgcagccgcggttgtcgttgttgaggcggtagatgttgtacggcgtcatgccctggcgtgcgcgttcggtgagctcgctgggggtgcgctgcaccatctggccgtcgggcagggtgcggatctcgggcacgtactccgatgctttggaatcccacatctcgtggagcgtgtccaggtagtctttgccggggtaggcgtcgagcgagatgttgtcgtaggtggttccttcctcgccggcaatgatcgcgttctgctcgtcggtgtattcgggggcttcttcggcttgcgcttggtcctgtgcgctgggtgttgccgattcgtttgcttttggcgcgcaacccgcgatgccgacgatgccgatcacggcgcatacggttgcggccaagagctttctttgtgcatgcattctatcccttcctttctttcttctcttcgtccttgtgtctcgcttctgcgcattggcgtcgggctcgacgcttcttgtggcccctgcgccgaggcttgcctgtcgaaccttatgccgaggtttcccgacttgcgttttgccgtgggtttccacgggtgtagccatctcgcgcgggtgcgcgggcttcgtccgacgtgcaatgctcgcccagattagagatggattcgcgcgcacgctatcgtcgaagcgaaccatttgccgcttttgggcatcggtcgaaacggaggatggtggttgagctgggaatttggtagactgtgggctagttttccagagaagtcgtttacagaggtcgtccatgtcgcccgcaaaacgccccacaaaacgccccactcgtagagacggccgccaggtgagccgtccctcagttgcgggctttgacggacgtgagccgtaccgctctggagctgaggcttgtggcgggcgggatccgtatcggtctggggccgcggctcgcggcgggcgagcgccgtatcgccccgaccccgaaggtcgcagtgggcgagcgccgcatcgacccgaccccgaaggtcgcggtgggcgagcgccgcatcgaccccgaagcgcctcgccgcagcggcgccccatgctgatcgcgcttgccgtgctgctcgcgctggtcgctgggggagtggcgggcgcgtatgcgctggttcagagcgcctcgcctcaatcgggtgcgcctgcaggaggcgattcgctcgccgtttcggaaggctccttcgagccgcctgctgcctctgaggaagaaccgacgggcataaccatcacgttcgcaggcgattgcacgctcggaaccgaagagagcttcgactacgagtcgagcttcacgggctattacgatgcgcagggccccgactatttcttcgccaacgtgaagagcatcttcgaggccgacgatcttacggtgtcgaactgcgagggtgtgctcaccgaggccacgacgcgcgaagacaaggaatatgcctacaaaggcgcgccgctgtatgcggagatcttcgcgcgcagcagcgtggaggcgaccaccgtttcgaacaatcacatctacgattacggatggaacagccgaggcgacacgcttgctgccctcgatgctgcgggcgtgaccgctttcggtgacgagatcgtcgcctatcgggatgtgaagggcgtcaaagtggcactcatcggcgcgaacatgctgagtttggggctcggtatccaagatcaggtggtggcgaacatccaaactgcgcagaacgagggcgcccagatcatcatcgtgttcatgcattggggcgtcatgcgagaatacaatccaactgacgatcagatagcccttgcgcatagcgccatcgacgtgggcgccacggtggtggtcggctctcaccagcacgttttacaggggtacgagaagtacaacgggcgctacatcatctatgggttggggaacttctgctacgggggcagccgtacgctgttcgaccccgattgctatatcttccagcagacgttcacggtggccgaaggcgggatcgagaccgacgatgcggtcgaaatcatcccctgcctgatctcgtcgaacagcgagcgcaacaactaccagcccacgatcgccgagggcgccgacaaagagcgcatcgaagcaaagatcgccgacagcaacgcgagcatcgcctcgcgggcagagtagggcagcggctggctgcggctggcgcgcccgatggccctgaggcgaaagtcgcgtcgcctaccggcgagtgcctgggcgccgtctgttccgatcgctgtcgagccttcgatcctctgcaggcgcttccccgagctgcgctgggcacgcttggcggcgcaatcgtgcgttctcgtgagaaaaaccttgacttgggtacaggttttttcggttttgtatgctgtttcctgcctccgcggattgggattttgcttcgcgaggacacgccgatcggtaatgccagaagaatcccaggtcgaaggccggtcgttttttgccgcccgaagcctccgaatgcagctgagaacttcgagcgtacaaaaccgaaattatccgtccccaggtgccccttttgctcacgagcgtcgtttggcgagcgcctcggagtgccgttcgcaaagcgtgcgtatctgcacctgggagctccgtttcctgcgtgagtcgttttggtttgcggatgggcgaaggagcgccgatatttcttgacgcttgcagcttggcgggtaccagatagttggttgaggtttgctctggcgagaagaaacccatgcagtgagaccctttctcgtatatgatgaaccaggggatgtaatcggcgttcttatggggagctatggagactgcgcatcttgtagagttcatcgcgtttaccgacacgctcaactatacaaaagcggccgaagaccttttcatttctcagcctgccttgcgttcgcacgtcaaggcacttgagagcgaggtaggcatctcgttcgttatcaagagaaacggggttctcgagctgacgcctggcggcaagctgttcttgaagcatgcgcgcgaaatagtgaagatggcggatgcggctcttctcgagtgtcgagccctttcccaaaattcgacggcgctcttggttggaacgctcggttatccggtgctcgaggagcatatcggagctgctcgcgatagcttgcgttccagataccccgaagctcaggtcgacatacgcttcggttattcgacgcatgccaatttggcggctattgtcgagggaaaggtcgatatgaccatgtatcctcggattaggggcgtcgacgaatcgtgcgttccagatgatttcggctttccttcggaggtcgaggtgttgcgtctcggcaccgagaagatatatttctgggtcacgaagaacaatccgctttttgaaaaacccgagattaccgccgaagatctgcgaggccaatcgcttcttctcggcaatactgacaacatggtatccgccgggggcaagttcgttgattacttcaaggttgcgggggtcgatatcaaggtcgatcatcagccgtttgcaacgtataccgactatatgttctccactcctcacaatgggttcgggatggtcgtggaggctctgcatccgacgtttcggtcgcgtaaggatttcaggatgttttccgtcgaagagttcacggtggcagcagatatgctgctcatatatgatccgagcgctttcgatgatatcgggcaaatgtatgtgagtgagttggtgcggcgaatccaaagcagcgagctctgttctcgataagacgcaccccgctcgatgagggggtgcgtccttgcgtgcatttggagcgaccgtcagctacgaagcgtcttttccgtctgcggttatgatggagcctgcggctatgtatcctccgacgaacgattggcaaacgtcaccgtacattccgccgaacggctttcctgcgatattgctttctccgttggcgccgccagccgtatgccatcccgcatacaggccggggatgacttcgccttcgacgctgatgacctgcattttatcgttgatgcgcagaccgcattttgtcgtgaagatgtttccgccgatcgcggcgccgtaatacggcggctcgttgatggggatcatccagctcgggtcgtatttgaaggtaggcatgtcgtcttcccccgcgtcgcacgcttcgttccaggatttaacggcgttgacgagcagccccttgtcgagcccgagcgcttcttcgagctcctcgatcgtgtcgcatttcttgacggctccgtcttccaccatcatctcgaacccagtgcgccagtcgcgttgccactcgggtacgcgatcgatgagcgggtcgtcgtctggaatgatcttgccgaccctgcaaactccctgcttgaaatagttttcggagacgagatcctcgtacttcgaatcgaaacatacgaaggtgcggttgcctggctgcatcatttcgacaacggcttggtcggtcaggccgaacacatagggcgatccggatggggcgtaggggtagggttgataggttgttcccagatatggaacgcggtcgcccgaactgttgagaaggagccagggctggcgcacggcttgattcccatccttgttgacgtgcgctgtcatccgggtttcgtattgatcgtaatccttccaccagacgccgccgtcgtagcaatgcgaagaatcgtatccggacatatcggcgccagcgccgatgcccatgcggatgcattcaccggtgttgcacggcgggcagggtacgtttgcgaagccgtcgaagctcgatggcaggtacttcttcagcatggcgcggttcatctcgaaaccgcccgcggtgagcacgacggcctttccggcatgaagataggattcaccgtcggctgcggcgacttttacgccgacaaccgctccctggtcgacgaccagcgctttcgcctcggtgcccagtcgaatatcgacgccctgttcggtagcgaagtcggtgaggtagttgaacgtgtggtcgttgatcttgatggcattggttttggtgatctgaccgtcccaatggaggctgcgcatgcccgacggggtgctatcggcgggcgcccagggcacgccgagcgtatcggccatccaatcgatgcagtgcggcccctcgaccgcttgcacgcgaagcaaggcgggatcggcgctttgctgccaaaggtcgttcagatattcgacgatggcgtcggggtcataggggtagctcgggtacgcccattgagcctcttcggccagtttgtgcccgccgaagttgacgaaatggcccgaataccgcgaggcaccgcccgtagtctggtccttttcgagcatgatgacattgtatccatccattgccaggcgaatggcagacgccatgccgccgccgcccgaaccgacgacgatcacatcagcttctccgtcccatgaggccgggggctcaacggggtcgatcggtgcggcctcggcttcgaatgccgcttttgcgctgtcttctttgtcggaggctggagtcgaatcggttttgttcggcgaggagcatcctgcgaacacggcgcttgccgccgctagcgctcctgttgcagccgctcctttgagaaatccgcgcctcgataaagcgtggtggctgtcgctttgcccggtaccctcgtattcgttctctttcatggtggaactcccttccttttgagtgcatccatcccgggatgatcttcatgctacccgccaaatagcgtgtagaaagggagggttgcggaagggtggagcgcggtttgcgcgcagggcgacgaaaatcgaaagggggtgaagggttttcaaccaggggcgcttgcagctcttgggctataatgcggcttcgtgatttttgcttgttgattcgaacaccagatccatcatgtcttgccggttgttgacgccgagctttccgtaaatgtgggcggccgcatttcgactaagcgggcgactacagcatgacggtgcgcgcacgaaccgccgatggtgtggtgtctccccttgcggcgacgctgctgttcgcggtttcgtagcataagcatgtgttgaccgagatgcaaaacggggcgttcgaaccttttcgagcgccccgttgcgggcgacggctattcctcttcgtggtcttacaggttctcaaccgcatcacgtgcggcgacgcgacccgagttcacgttgttggcgttgcagccgccggaaacgttgatggtgtagatgttgttccagagcatcgctccctccactcctacgacgtaaaggcccttgatgggttcgtggttttcatcgacggcatggaaggtgcgatcggtctgcagcgagccgatgctggtgttaacctgcgggatcacatggatcgcgtagaacggggccgttgaaagaggcatcatggcctcggctgattttccgtagtcgagatcggctcccgttgcggcgaacccgttgtagcgatcgacggtttccgtgagcgctgaagcgtcgatgcttgcctgggaggcgagatcgtcgagcgtatcggctttgagaatctcctgttccccgatggcgtcttcaagctgtttttgggcgtccgcgtcgccgttgacgaacatgtccatcatgggcgcatccattatgatgtaggttttttcgtttctccatgtcggcatggtcatagccatggcgtttgctcccgcgaagtcttcgttgatgaaacgctctcctttttcgttgatccacatcgagtacggcgccgctatgccgacgacgaaatcgaacttgccgttgtcatagtagcctggggtggtcggcaccttgaaggcagccagcatcgccgtgctttcgcgattgcttttcgcgcctgccccgattcccatctggtgaccgaggccgtcgtgtccgggaacgccgccgatgacgtagctgttaggtttaagaccgcattccgccatgtaatcttggttgtcggcaaaccctcccgtggctatgatgacgctcttcgcgttgatttggattgcatcgccgcctttcgtttccgcgtatgctcctgcgacggatccgtcgtctgctttgatgagcgatgttccttcggtgtcgtacatgaacgtaacgccgtttttttcggctgcctccaccatggcgggaacgtagtctttgcctccggtgtgatttgcgaagcggtggaatacgagaatgtcgcccttgtcgacgtcaacctggccgaacgtaacgccgttgtccaaaagccagtcgatgttctcgcctgaattatgcaccatgtcaacgtatcccgggccgctgcagcgatattggctctgctcgatctcgaggcgaatgacttcgccgggatcgacttcgatgccctcttccttctgcatgcgcgacccgacgccgaagcagccctcgacgccgttcatgttgcctccggcgaccgactggctttcgatgcagatcgtgttggcgccgagctcgccggcttgcacggcagcggcaaggccagctgctccagagccgattacgaggatgtcgcaatcgtgcgtttcgttgatgttctgaggctgttgcggcgcggcttcggtgctctcggagctctgcgcggcatcggtttgcggttgcgtgcagccggccagcatgccgaccacgcctgcggctgcgagcatgcttgctcctccgataaactgcctgcggttgattccctctttcatgatgttctcctatccgttgacgaatccctcccgcttcggcgaaacctctccggcagcatggtgctgcaaaaattcgtttcgccgtggggtagcgaggagaactatgcgttgccgcacgtggattgtattcatacaagagaggtgttttcacctcatacaaatgaggtgataggttgttgaacaggcatttcggaaatgctagcgattgatatcgtcgagatcgatgttctcgatgaaaacgatcagctcgtcgcggctatgcacatcgagcttttggtagatatggacgatgtgcgttttgacggtgtttcgggacagataggtctctgctgcaatcgccggaacgctcttgccgcgcaagatgtattggagcatttcgatttcccgcgcggtaagcgaatatgcggatgctgcacggtcgattttcttctgcatggaggcggacagagcgggaaagcctttggcgggtccggtgctttcgggcgcgacgccgttttcgagcattgtttcggttgggaagcggggcatcaagaggaagcctgcaagggcgacgacgtatacgacgcctaaggtgagttcgagatagaagccgctcaaaaacgtaagggaaacctcggcggtgagcatcccgaggatgaatcccccgtcggtgaggcagacgccgagcgcgaatatgcgtgcagcatgggatcgtccgctgtgcgcgattttcgcaaattcagagtacaggagaatcgtaaggagctgatgggcggagtatacgagaattcccgagatggccgcacgttcgtctccgaacgtggcgatgagcagcaagcctccgatggcgacgggaatgacgaccttcggtataagcgaggtgtcgcgtttggatgcgatgaagccatcggcaaccacgagggcgatcaagacgactagcgaaagcccgatcgtggtgacccagctccatgcggcattctctgctccgaacaagaagcggacttggaaaaacccgagaggaatggagtacacgaggcagaatagggcaaaccgcggggaaagcttcccctcttcggcttcttgcttcaaggcggggctctcgattttgcccaagccccgatacacgcaggcaaccgcgagaagcggcatagcgaaaagcacggcaaccatcgtttgccgaggaagcatggcgatggcaaggaagagaacctctgaaacaaggattcccacggctatgatcatgcgcttcttgttgttggtgtatagcgaggaataaagctcgcaccaacaaaccagctgcccgcttgttccgattccaatggtgatggcaccgaacatgaaagcgccgctcgattcgcctccgagcatgtttgcgtacaggatcgcggcgaagccgaggatggatatcagcggcgatccgagcaggacgatcttgttgctcgagtagggcgagtattgattcgagagcgcgccgagaagggtgagtgcggcgatgtgtcccaaggtcgaccaaaaccaagcgctgtcgaacacgggggaggaatgagtgttcgaaaagaagccggtaagcaggacgaacaacaaccaagtccagtagatgctgaatcctagggtgcagtacacggatgcgaggcttttgttttccgcaagcggcttgatggttcctcctgaccgcatgcccgttcggtagatgttcggcattgtagcacaagggattgtctcgaacctttcatgggcaggcgattgccgttatgcggccggcgaagcgagcgatggcgatagcggcgcattttttcgattgccattttctggtggaacaaggggaatcccaaagacgggtgcgtcttaatcagatcttaatgcatgcgcgtgcaactttaatgcccccctaatccgttaatccctattctaaataaggcttttcgggctgcgttggtagcgcgcgcccggatggctttgtgttggaagatgttctcttgtgaaaggactaagggaatggaagtagtaaccgccatcgttggtggattgagcgtggtggtcgcgctctatctattctacgtgctcctcaaaggagatgacgaacgatgatagacgagattttcgaatatgcaatctatgtagctttgcttgtggcgctggccatacctctgagcagctacatcaacagggtgatggctggcgagaagacgcttttgggacgcgttctcgttcccgttgagaatgcgatctacaaggtcacccgcgtcgataaaaacgagaacatgggctggaaacgctacctggtcagtgcccttgccttctcggccatatcgcttgtcggcctgttcgcgatcctcatgtgccagggtttcttgccgttcaatcccgaggggcttgacggcctgtcttggcatctggcgtttaacacggcagcgagcttcgtaacgaacacgaactggcagtcctacagcggcgagagcgcgctgagttacttctcgcaggctctcggcctgaccgtccagaacttcgtgacgcctgcggtgggcatggcggtcttgttcgccctgttccgtgggatcgtcaacgtaaacgagaacggcctcgggtccttctgggccgacgttacgcgcggaacgctctacgttttgatccccatctgcctcgtgactaccatgatcagcgtatggcagggatcgccccagaacctcagcgagtacgagaccgtgcagcttctcgagcccgtgggcctcgatgccgacggcaacgtggtcgatgccgatgatcccgctgcggtcaccgtcgtcgacgaagaagtgataccgatgggtccgcaggcgagccaggtggctatcaagcagctcggcaccaacggcggcggctacaacggcgtgaactcggcgagcccgttggagaacccgacgcctttgagcaatctcatccagtgcttgtcgcttctgctgatacccgttgcgctcgtgttcagcttcggcaggtttgtcgccgacaggaagcagggcagggcgatattctgggctatgttcgcaatattcctagtcggccttttcgtcgttgggttcttcgaacaggcgggtacgccccagcttgctcagaacggcgcggtctacatgggcgtcgacggccaggcgggcggcaacatggagggcaaggagacgaggttcggcatcacggattccgctctgtgggctacgttcacgaccgccgcgtcgaacggctcggtcaactcgatgcacgatagctacactccgatcggcggcatgataccgatgatactcatggccctcggcgagatcatctacggcggcgtcggctgcggcctgtactccatgatcggcttcgtcatcatgaccgtgttcatcgcgggcctcatggttggacgcacgcccgagtacctcggcaagaagatcgggccgaaggagatgcgcatggcggtgatcctgtgcatcacgacgcctctcgtgatcctcgtcgggacggcgatcatgtgcctcgatccggcgacgttcgatagcttgaccaattccggaccccacggcttctccgaagttctgtacgcggccatttctgcgggcggcaacaacggatcggcctttgccggcctcaacgcgaacacgccgctcatcaacacggtgctcgggttcgagatgcttgcgaaccgcttcatcccgatcgtggcgacgtgcgtgctcgcgggcagcctgtgcacccgtccgaaggttgcggtcagcgccggaaccctttcgacgaccaatgcgatgttcgtgttcttgctgatcctgatcgtgcttctggtcggtgctttggcaatgttcccggctcttgccctcggacctatcgccgagcagctccagatggtgctttaggaagcaggtgagatgaaagatgacaacgactgttatggacaaatacgattccaaagtgctcgccaagcgggctgtgaaggatgcgtttctgaaacttaaaccgaaggaccaggcgaagaacccggtcatgctcatggtgttcatttccgccatcatgactgcgatcctgttcttgctctcccttgcgggcattgccgatcagcaacccggcttcatcctggccatttcgatcatcctgtggctgaccgtgctgttcgccaacttcgcggaagcgctggccgaagggcgcggcaaggcgcaggccgattccctgcgcgccgccaagcgcgacgttgcggcccacaagctcaacgaggggcttcttgcgaagggggcccacgaagaggatgccgcgaggttcttcctcgtcaactccgaggaagtgaattcggccaccctcaagaagaaagacctgttcttcgtggccgcaggcgagcagatacccgcagatggcgagatcgtcatgggcgccgcatcggtcgacgagagcgcgatcacgggcgaatcggccccggtcatccgggaatcgggcggcgaccgctcggcggtcaccggcggcacgacggtgctttcggactggatcgtcgtgcgtgtcacggcggatgccgggcacagtttcctcgatcagatgatctcgatggtcgagtcggcctcgcgtaagaagacccccaacgagatcgcgctcgagatcctgctcgttgcgttgactatagtgttcctgatcgtggcgatctcgctcttcacgttcagcagcttctcttccgggctttccgagatggcgaaccccacgacgatcacctcgctcgtggcgctgttcgtgtgccttgcgccgaccaccatcggcgccttgctctcggccatcgggatcgcaggcatgagcaggctcaacaaggcgaacgtgctcgccatgagcgggcgcgccgtcgaagccgccggcgatgtggacgtgcttctgctcgacaagaccggaaccatcacgctcggcaaccgccaggcgagcgagttcatccccgtcgacggggcgaccgaagaggagcttgccgatgcggcgcagctcgcgagcctgaccgacgagacgcccgagggacgcagcatcgtcgtgctcgccaaggagcgcttcaacatccgcgaacgcgaactgggcggcgcgggcatggcgtcgatcccgttttccgcgacgactcgcatgagcggcgtcgatttcgaagggcacgagatccgcaagggcgcggcagatgcgatcaggtcctatgtcgaaaaatccggaggaaggtacagcgatgagtgcaaacagagggtcgaagatatctcccgtgcaggtggcactccgctgcttgttgctcgcgatcatcgtattgtgggcgtcgtctatctgaaagacatcgtcaagcagggcatcaaggagaactttgcgagcttgcgcaagatgggcatcaagaccatcatgatcaccggcgacaatccgatgaccgctgccgcgatcgccgccgaggcgggcgtcgacgacttcctcgccgaggcgacgcccgaggcgaagctcgacatgatccgccgctaccaatccgagggccatatggttgccatgacgggcgacggcaccaacgacgcgccggcgctcgcccaggccgacgtcgccgtggccatgaacagcggcacgcaggctgccaaggaggcgggcaacatggtcgacctcgactcgtcgcccaccaagctcatcgacatcgtgatgataggcaagcagctgctcatgacgcgcgggtcgctcacgacgttctcgatcgccaacgacgtggcgaagtacttcgccatcatcccggcgctgttcgtgccgctgtatcccgcgcttgatgcgctgaacgtcatgcggcttacaagtcccgagacggcgatcctctcggcgatcatctacaacgcgctcatcatcgcggcgctcatcccgcttgcgctcaagggcgtgaagtaccgcgaggcgtcgtcccagagcctgctttcgcgcaacctgctcgtttacggactcggcggcatcatcttgcccttcgttgcgatcaaggccatcgacatgctgcttacggcgtgcgggatggcgtagcggacggcgtcgaagaggtgcgcggcgattcatctgccgcgcaccgcgaaaaccctgcgaaagcgattgcggtcaacgtgaaaggaaaacgcgatcatgaaacacttcagtattggaaaaacgcttgggagaaccgccgggttcttcgcgatcatgaccctgatcaccggagtcgtgtatacgggcgcgtgcttgggaatcgggcagatcttcttcccttaccaggccaacggcagcatcatcgaggtcgatgccgatggggacggagccaacgacagccgctactgcatgttgctcggccaacagttcgaggatgccgatcatatgtggggcaggccgacgaactacaacctgtcgaccttcaccgacgacgagggcgatcctgttgcgtgggcgggcgcatccaacctgacccccgcgggcgaagagttcgagcagctggttgccgagcgcgtggagaagatcaaacaagctcatcccgaaaggggagacaagcccattccgagtgaccttgtgacggtttcgggcagcggactcgatcccgacatatctcctgcggctgcggagtatcaggtggagcgtctcgcgaagaacacgggcaaaagcacctccgagattcgcgatatcatcgacgcgtgcaccgagcagccggtgttcggagttctcggcgatgcgcgcgtcaacgttttgaaggtgaaccttatgctcgacggggtgctatcataggcgaatcgcagtgggcggcaccgtttcgtgcggcgttgcgccctgcaaaaagacgaagcgaggatatgcggtatggttgacgagagcggtttcgagatcaggcgcgatcccgatgcgattctgcgccagatcaaagaagccgagcgcagcgacgagccgggacgcggcaagctcaaaatattcttcggttacgcggccggcgtcggcaagacgtacgccatgctcgaagatgcccatgcgttcaaggaaaaagggctcgatgtggtggcgggctacatcgagccgcatacgcgcgccgatacgacggcgttgctcgacgggctcgagcagatcgactgtcgcacgatcgagcatcggggaatacggctgcgcgaattcgatcttgatgccgctcttgcgcggaagcctcagattctgctcgtcgacgagctcgcccataccaacgcgcccggcagcaggcaccgcaagcgctaccaggatatcgaagagctgctgcgcgcgggcatcaacgtgttcaccaccgtgaacgtccagcatctcgagggtttgaacgacaagatatcggcgatcacgcaggttcgggttgccgagcgcattcccgactccgttttcgatcgggctgattccgtcgagctcatcgatatagagcccgacgatctgatagagcgcctcaatgcgggaaaggtatacgtacccgatcgcagctgggttgcgctctcgaacttcttcaccaagaaaaacctcgccgctctgcgcgaaatcgctctgcgccgcatggccgaccgcatgacgcgcacgccctccgtcgacggggcggcatgtcgcgtcgaggcgggcgaagacgtgctggtgtacgtgacgcccgatgcgggcaacgtaaaggtcatccgtgcagcggccaatatggccgaagcgttccacggcgccctgaccgcactcgtcatcgaatcgtcggagagcaagaagctcggccccgaagagcgcgcccgcttgcgttcgaacatcgatcttgccgaagagctcggcgcgcatgtcgtgactatgcacggcgacgacgtcgccgtgctcatttcgcagtactccataaccgcgggcatcacgcagcttgtgctgggcagcgcttcgggcggcaaaaggctgttcagtccgaaggaaaatctggtgagccgtctttcgcacctgtcatacggcgcggttatcaacgtggtgccggtgaaggatcttccgatgcagttgagtcggtttcgtcccgctacggggttcaagctgacgtcgggggatgtcgtcaaggcgtttctggcggttgcggttgcaacggcagtcggtttgctggtgcatgggctcggccttgcatcgtcggtcatcctcatgggctacatgctcgtgatcctgctgttcgcgacgcgtgccgacgggtttttctattcggtcatcgccgctttgggaagcgtgctcgcgtacaacttcttcttcacggttccgcgcttcaccctcgatgcgtacggcatcaactatccctttattttcggattcctcatggtgtccacgctggtggcctcatcgcttaccgtgcgggccaagcggcaatctgaggcgaccgcgcgtcgcgcgtaccgcaccgaagcgctgctcgagagcagccgcgagctgcaggcggcaacgtctatcgaatcgtgtttcgcgatggctgcgaagcagatcatgaagatactcgatcgccccgtggtgatgtaccaggctttgcgcgacggccgcctgtcggctcccgaagtctacgacgttccgggaagcgggggaggcgatgcccgttcggtcgatctcgtctcgccttacgaagtggccgttgcttcatgggtcgcctcgaacaacgagcgcgcaggcgcgacgacgaacacccttgccgaagcccgatgcctttatctgcccatcaggtcgaagggcacggtgtacggggttgcggggctcgtgatggaagaggagagcgaagacttcggttcgtttgagaagaatctgctcatcgccatgctcgatgagtgcggtcaggcatgcgagcgcatcgtgtcggcgcgtgagcgccatgagatgcgcacgaaggcggagaaggaagagctccgctcgaatttgctgcgaatgatctcgcacgatctgcgcaccccgctcacgagcatttccggcgatgccgatatgctgctttccgagggcgggcgtctgagcgacgagcagaagcggcgtatgtacgaggatatctacgaggattcgacctggctcatcaacctggtcgagaacctgctgtcggtcacgcggatcgacgaggggagcctgcagctcgatatggagcccgaaatcgtgggcgatatcgtgcgcgaggcggtggcgcatacgaatcggaaaggggccgcccacgatattcgcgtcgatgttcccgacgagctgctcatggtgaaagccgatgcgcgcttgatcatgcaggtcatcataaacctggtgaacaatgcgatatcctacacgcccgcgggttcgcgcatcgaggtatcggcacggcgagagaaaacagccgatgggcatgcggtgcgcatcgcggttgccgatgacggccccggggtccccgacgctgacaaggagcgtattttcggcatgttcttcaccgggtcggaatcgggtcttctcaaggagggaggcgatgcccatcgcagcatggggctcgggcttgcgctctgtcgctcgatcgtgcgcgtgcatggaagcgatctggtgatttccgatgcggacccccgtggcagcgtgttttcgtttatgctacccgaagcaaccatgggcggcgatctgggcgagcgtggcgacggctcggccgagagcggctcgacggccgaagatgcggctgaaaggggcctgccgggcgccggcctgtcaggcgttggcgaaaacgatcgaaagggttaggcgaatgggcgaatgcgcacggacgatcctcgttgtcgaggacgatgcggcgatccgcaacctggtggccaccacgctcgacgtgcacggctatcgccaccgcgtggctccgaacggcaatcgcgccctgctcgagctgacctctgcaacagatatcgacctggtgattctcgatctgggtctgcccgatatggatggggtcgatatcatccgttcgattcgcggctggtcgcatatgcccatcatcgtgctgtcggctcgcaacgaagatgccgacaaggtagaggccctcgatgcgggcgccgacgactaccttgtcaagccgttttcggtcgaagagctgctagcccgcctgcgcgtggcgctgcgaaggctcgatgccgggatcgcaaccgaagaggaggcggtttacgaaaacggcgatctgctcatcgattaccgcgccgcaagcgtgtcgtgcggcggcgtggaaattcatctcacgcccatcgagtacaagctcttatgcctgctcgcacgtaatacgggcaaggtgctcacacatacctacatcctcaaggaggtgtggggcacggcgcttgcatccgatataccatcgcttcgggtgttcatggccacgctgcgcaagaagatcgagcccgatccctcccatccggtctatatccagacgcatgtcggcatcggctaccgcatgatgcgggtaggggattcggcgtaacgggaaggcgcccgcctcgttgctacggggtgggattctcctcttctttggggtagacgatccatgcgacgatgaacgagacggcgatgcatgcgattacgcaccagagcgtcaccgcgaagccgaagatgtcgttgatggccccccaagcaaggcaggaaagcccgattccgatatcggtggccagcaggtacagggcgttggctgctccccagcgattcgaaggcgtgttcttgacggcgaccgactggctgatcggcatgctgacgccaaggcagacgccgtaaaagatcccggcaagatagaacagcgcatgctgtgcttccgaggcgaaaagcagcaggtaggcgatgattccgcatacgacggagacgccgaacaccttgatcggagcaaccctgtccatgtacgtgtccgatttcaggcgcacgatgatcatgctgatggcggaaacggtgaagaacaatccggcattgccgatgccgatcgatgttccgtacagcccgatgaagaagatgccgaatccgaatgcggggctgatgatggccatgggcagtgcgcccggcacggcgcgcgcttcgagcacgcggccgatgccccgagggatggattcgtctgtcccaggctcatctgcagagacgcccttctgcggcgaggcggcttgttcggcggtttcgttcgggctgatggcggcatcgtgctgctcgtgctgccgggcttcccaccgcatccggaacaccgaggtctcgggaagcttttcggggtttcgttcgtagcggcagaacagggtgagcacgagggcggcagctgagatgcatgcgcatccgaagtacaggttgccgggtgcgtcggtcgataccagaaacaaccccaaggcgggtccgatcgacatggcgagcgcctgtccgagtccgtagtagccgatgccttctccaagccgcgaatagggcagcacgtcggcggcggctgtagcggcggcggtcgtcacggcggaaaagccgatgccctgcaggattcggtaagcgacgaacagggatagttcgtccgatacgaggggcccggccgagcctgcaacaaggaatgcggcgccgatcgtcatggtgaacgcgcggcccttcgaatcgatgacaggtccgcagaccaggcgcgccgcacctgcggcgatggagaatacggcggcaagcagacccgaaaacagagccgttccgcctcgaaggtcgatgtagaccgaggtgccggcgttgactgcctggccaacaacgaagcagaagagcgccaatccgacgatcaggacgaatacgggcgtccagagttttggccgtggcgagcggttcgtatttcgcttgggggtttccatatgcccatcatactcgttaagcggcgcatgtgatcatgccgataggctgaaattacatgtacgcccgccgaacagcgcatgatgacgccggaagccctctatttgaccgcagtatgcactgcggcgatgccccctgtgaagtttcgccacgcgacgtcgtggaatccggcatcttcgagcatgccggcgaatgtcgtttgatcggggaaagccttgatcgatttgctcaggtacacgaacccttccttgtcgccggtaatgagtccgccccaaaacgggatcatgtgcttgaggtagaatccgtacaacgcccgccaaacagggttgggtggcgttgagaattcgaggcacacgagcgtgccgccaggcttgagcacgcggtggatctcgctcagcgcgcgattccgatcgggcatgttgcgaatgccgtaggccatggtcacgatatcgtagctgtcgtcgtcgtaggggatgttctgggcgtcgaccacctcgaaatcgattggcacgccgcatcccgatccttcgtcgtaatgcgttttcgccacctcgagcatttcgggaacaagatcggtgatctggatatgcgcgggatgcgcagagcaggcgatggtgaacgagacgtctcccgtgccccccgcgatatcgaggatgctgctctcttcggtgatcggggctgcttctatcatgcctttgagccagcctttgtatgcgccgaagctcgatatggcattgaaccgctcgtacttcttggcgatggcggagaatatctcgtacacgcgctgcgacgagatctccgcgggcgcttcttcgccggtggcggtatcgatggtatgcggctctgcggcggttcctgctgtcatgacgtccttccggcagttctctgcgcgattgtcttcgggcaatcaccgatgatacccgaactgagcggttttgccgaggaaatgtgctgctttcgggtgcgagccttcggcgtgcgccgagacgcttgcggcagccgatcgcagccgtcttggcgcgatcggcgaaatgaaaagttctcggctccgaaaactgcccgaaacattgcgccgatagtttggtaacggcaagttaatcgtgtgtattgatgcgacctcgtgatattgtatcggtctataaaacagaaagaccgttgctcggcatcgaacacgctgtctgcgaaaaggcaacaggtgaggagtgttaacaacatggcgaaagtttcagaaaactacggcacgatggttttcaacgactacacgatgcaggagcgcttgccctctgcaacgtacaagactttggcgaaaaccatcaaggagggaaagcccctcgacgaggaggttgccaacgtcgtcgcccatgcgatgaaggaatgggcgatcgagcgcggggctacgcactacacgcactggttccagcccctttccggcatcacttccgaaaagcacgacagcttcctcgatccgacggccgacggtcgcgccatcatgacgttttcgggtaaagagctcattcagggcgaacccgacgcatcgagcttcccctcggggggtttgcgcgcaacgttcgaggcgcgtggctacaccgcttgggatcctacgagctacgcgttcatcaaggacgaagtgctctgcatccccacggcgttctgctcctataccggcgaggcgctcgacaagaagacgccgcttctgcgctcgatgagcgcgatcgaagtgcaggcgaagcgcgtgcttgcgcacttcggagacggcgacaagcatgtggtgaccacggttggctccgagcaggagtatttccttatctccgaaaaagactacgcgcagcgccaggacctcgttttgaccggccgcacgctgttcggcgcgccgccgtgcaaaggccaagagctcgaagagcattacttcggagccatccgcccctcggtcaacgagttcatgaaggagctcgacaacgagctgtgggcgctcggcgtgccggcaaagaccaagcacaacgaggtcgctcctgcgcagcacgagctcgcgcccatctacaccaacacgaaccgcgccatcgacgaaaatctgctcaccatggagaagatgcgccttctggcatcgcactacgggcttgtctgcctgcagcacgagaagccgttcgagggcatcaacggttcgggcaagcacaacaactggtccatttcggcaggcaaggtgaacctgctcgacccgggcgacacccctatggacaacctgcgtttcctggtgtttctcaccggcgtcatccaagccgtcgacgaataccaagagctgcttcgcatgtcggttgcctctgcgggcaacgatcaccgcttgggtgcgaacgaggcgccgcctgcgatcatctcgatcttcttgggcgacgagctcggcgagatcgtcgatgcgctcatcgacggccatgagtactgcaacgccgagaaggttgccatggacttgggcgtggcggtgctgccgaacttcctcaaagacaacaccgatcgcaatcgcacgagcccgttcgcgttcaccggcaacaagttcgagttccgcatgcccggttcggcggtgaacctgtccgatgcgaacatgatcctcaacacggccatggcgaagagccttaaggaattcgccgatgaaatggaaggcaaggagggtgccgaattcgaggcggccgccatcgcttacgtcaagcgcacgctcaccgatcaccagcgcatcatcttcaacggcaacggctattccgacgaatggccgatcgaagcggaaaagcgcgggcttgcgaaccatcgcacgaccgccgatgccctgccatgctacatcgatcagaagagcatcgatctgttcgaagagttcggcgtgctcaacgaggcagaggtgcacagccgctacgaagtgaagctcgagaaatacaacaagcttctgaacatcgaaatccgcgtgatgaagcgcatggcgcgccgtacgtacttgcccgctatcaacgaatacatcggcgagctcgcttcgacgctcaactcgatcaaggcggcggctcctggagccgatacgacccagcaggaagagacgctcggcaaactgctcgacggcgtggcgaaggcgttctcggcgctcaaggcgctcgatacgttccataaggaagtcgaggcgctcgaggacgagcaggagaaggcgaaccgctacgcgcacgagggaacgccgctcatggaggcgctgcgcaccgagatcgatctgcttgagaagctcaccgatcgcgatcactggccagttcccacctacaacgatatcctgttctacgtatagggcagttccggtaacgggaaacggaacagcgccgcccgttggctcgggcggcgcttcgtcgtggtacaggaatggcgttgcggacggaagcggggtgatatggatacgcagaaaagcaaagaaggctatcgcgcggcgctcaactggccgctgctcatcgccggcatctcctattggggatacgttaacctgctgttttcgttttcgagtattcacccgagcgaagctgcccccagcggtcccgatgccatatggttctattcgctgttcggaaatctcgtggccctgttcttggcggccctcaggccgagcaaagaagcgcatgcggtcggaaacgctgcgtgggtgaccgtctcctgcgcttttctggtagtgggcgcctcgatgttgttcgcaatcaaactgcagctgctcgctccagtgcttcttccgcttgcaggcgctctggctggtttcggcacgggcttctccttcgtcttcttcgcagagcttttttcgggtatgcggcttcagatggtgctgctctacgcaggtgcacatcaattcttcggcgtcctgctctatctcgtcatcgcgctcttgcctcctgctttcgtcctcgggtttacggttgtgctgatactggtgtacgggtttttgttcgctcggctcgggaactcccagaaaggagcgcccggcgcgctcatcgaccgcgtggtcgtgcaaagtgacgtgacccttccggtattcgtcgtggcggcgttgttcgtcggcgcttgctatgggctcgttcgggcgctcacgataggtttcacgccgacgatgaccgtgctttcgccgacggactccctcggcggcttggctggcggagcgttgctgatgctgagcgcgctgttgttcattaagaagaatcccgcggagtacctgtaccagatcgccattccggttcttgctcttgggttggtgacggtgccgttgctagcgtcggggattcccgtcgctctgccgatcctcttggcgtgttcgtcgtatttttacgggctgctctggttcttcgtcgtgcttgcatgcgcgaactccacgacgtcggttacgcgtatcggtgcgttgtcgtttttctgctttcagctcggtcagcttatgggcacgattctgatcggcgcgatacccgatgtcgccatggggctgtacgccgtgagcgtggtcgctcttttcgcggcagtcgttcttctcgtgctcgttttctcgaagcagaagaaatccgagctcttgttgctgaagaaagccgaagagtcgaagttcgaactcggctgcgagcgggtggttcgggcatttgcgctcacccaacgcgaaagcgagatattccgactgcttgccctcggcgtcaatgccaagcagatcgccaagcgcttggtgctatccgagaacacggtgaagacccatattcgccatatttaccagaaactgggaatccattcgagaagcgaaatggaagagctgctcgacgaggaaaccgctgcgctcggccgtgatggcgcctcgatcggattgcccttttcgtagcgcacgtgcaccgattggcccaaatcgcccataggtatcgtgatcagctcaaacagacgtatcacccttgggtggtgatacgtccggttttaagttcatcactgaaaagcgagttacagactcccttgttttccgcatagtgcacggtgaaacgcgatggtgcgtttccgaaagggaagcgaaagaagaaagagggagatatgggtaacaaagcatgcgtcgatcgccgcgggtttctcaaggggtcggttgccattggcgcggtaaccgcgctcggcgctcttgcggggtgcagtcctcagcagggggggcagccggaagcagcttttgcggcggcatcgtctgagggggttaccgcttctgtcgtggaaggcaaatgggcgttcgagattccccccgagccgattgcggagagcgatatcgcggaaacggtggaagacgatatcatcgtcatcggagctggggtctcgggccttgtgacggcgctggctgcggcggaagagggcgcgtcggtcacgctcatatgcgcgggcacggcgccggttgcccgtggcggtacgttccatgcgttcaaaagcaggcttcttgacgaggtcgggttgagcgatccttacggcgccaatatcggcgagttcttcaaaaaggaaatgatggcatcgagttggaacatcgatcagcgcaaatggtatcgcttctacaatcatagcgaagagaccatgaactggctgctcgacaaagtggaagctgcgggatacgagtgcgtgatcgagaatttcgtcgccgatgagagcgctggcgtcaacacgtctgtggtcggcggccacagcttcatgggcggggagatcgtatcgaccggcatgggcggacctttggtcgttgaggttctggttgccgaaggcgagcgtgcgggcgtgaagtacctttattcgacgactgccaagcagcttgtccgcgaggatgacggtgcgggccgggtgagtgcggtcatcgccgagaaccccgacggggcgtacgtgaagtatgcaggaaaaaagggcatcgtcatggcgacgggcgatttttcgggagaccgggagatggtcgccaaatactgtccgagcgtactgccgtttctgaacgacaacaaagacacctacgacgcccagttccagttcggcggcttgatgcccggcgacggtcacaagatgggactctggatcggcgcagcgtggcagcatagctcgttgtgcacgcccatggtgttcacgggcggccctggtgccacggcctcgccatcgactgggttgttgcttgatgcccgaggagagcgtttcggcaacgaggatatgaccaacagcttcttggcgaacgccctgatgcaacttcccgatcaggcagcctatggaatctgggatacgggtgcggcgtcgtttttcaaatggcctgcggcggcgccgtacggatcgggcactatgacgccggaggatgttgttgcgggatgggagacggcttgcacgcaaagcaaccccaccatggtgaagggcgagacggtcgaagaagttgcagagctgcttgggctgccgattgacgaaacggtcaaagctgtggcgcggtactccgaacttgccgaggccggcgtcgatgaggatttccacaagaggccgcagctgctcagcccgatcacgacgggtcccttctacgggatgaagtacaaaggcgaggatatgctcaccatcatgggcggactgcgcacgaatgcagacatgcaggtgtgcgacgccgacgacaaccccatcgaagggttgtataacgtgggaacgatggtcggagacatgtacagcaatctctatacgctgctggtgcccggtttcaatctggggtcaacctgcctgacgttcgggtatctgaccggcaagtctttggccaaggcataggcgaacgcctgcggagaatcggagcagctcgctttttgcgtgataatgcgggggctcgactgggacggttcagttcgagcccccgcttgcggtatgcgcctgttcggtaggcctgcctgtgggcctccaaagcgggtcgtgcaggggaggtgtcctgagacgcttgatccgccctactgagcgacatcgggatcgcaggcgagtttcgcatcccacgcgacgacgaacacggtgctttcggcctccgagctacgggcggagatggtaccaccgtgctcctcggctacttcgcgtgcgatggcaaggccgaggccgtagcctccgatgctgcgttcgcgcgccttgtcggctcggtagaaacggtcgaagatgcgaggcaagtccgcctccggaatcggtgttcccgaattcgcgacgcgcagttcgatgcgctgcgacatgcgtgcgagtgcgacctcgacgcgaccgccgccgcccgcgtacttgtacgcgttgtccagaagcgtgctgataagccgctcgaggcgcagagcgttgcccatgatccagatgccctcctcgacgtttgaagccacgtcgatttctctctcgtaggcaagcgattcgaactgcagcaggttgcgctcgactatgtcgctcaggttgattggcgtgtggatgcggtctctcctcggcgcatccgtacttgccagaaagagcatatcctctaccagcttctgcatgttttcggcctctgtttcgatcgcctcaacccattggctctggcttgccacggttttttcggggtgcttgagcaggatcgaagcgtttgcaagcataacggtaagcggcgttttgagctcgtgagatgcatcagcgacgaactgctgctgtttgttccaggactcttcgacgggtttgagggcccattttgaaaagaagaggctgattgcaaagaaagccagcagggcgatgatgcctacgccggcaagggtaagggcaagcgtctgccattcttcggctgaccctttgtcggcgaatgcgacgaaggctccgttttcgttggtgtgtttgacgtagaagaggccgatcgggtcgagcaagcccgatccgtcaggaaccgaggcgatttgctcggccgcctgcaaaagcacgtcgtcggtcatggaggcggttgtggcgtcggagatcgcagcaagcgtcccgcccgattcgatctcgtatacggcaacgggaatgaagcgcttgccctcgccctttccgccgatttcgaacggcattctgtcgtcggcttcggcggacgattcgcccgaccgatcgctcgtggcggggggaatcgcagaagcgagcggttctttttttggcatggtgtcatgatcgattgcggattcgagcgttgcgtaaacgtcggcaaccgcctgctggtagttgatgacgcagatgatggagaaaatgacaagcagcacaacggctaccatcgccatgatgatggccacgaatttgactcggagctttttcagcgtggcgtctatgaagccgtcctcgcttcggattgggaaacctcggcggatgcgctgctcggtgcccggtcgccggcattatcgtttccgctttcggcgacaagccgatagccggctttgcgcaatgtttcgatcaccgcgcgagagccgagaaacttgagctttttcctcaaaaacgagatgtacgcttcgacgttgttgtcctcggcgctcgattcgatgccccacactttggcgatgagcgtttccttcgaaataacctggttggggttgagcatgaggatcttcaggatggagaattccttcaagccgagatggatggttttcttgctgcaggagagatcgaagctttcgaggttcagtgaaatatcggcgaattccacggtttcgaacacgatttcgccctgtcggcgggttagcgcccgcagatgggcgagcagctcggcgggcgagaacggctttgtcatgtaatcgtcggccccgctatcgagtccggtgatcttttcggggatggcgtcgcgtgcggtaagcatgagaacgggcgtgatcactttgcggcggcgcagctcggccacgacatcgaacccgttcattttgggaagcattacatcgaggatgatgacgtcgtagatatcgctctcgccgtaatcgaggccggaggcgccatcgtgaacgagatcgactccatagccgttctcttcgagtatgtgcccaagggcggctgcgaggcgcgcgtcgtcttcgacgacgaggatctgcatgatgccgcgctcctttccgccggtcttgcaggcttcggcgttcgtgtttatcgtgccgtctccattgtagccgcttgtcttaaattgccctgaaactaatcggcgttgcgggtagagcgtgatcccgcaccattcagggcaatttaaggaagcagccgtagcatatcgcacaatcggagcctctctgcacgtttcggacggtgctaatccgacaagggaaaggaaaagcgatatgactgcgttttcggatgtttttgcgcgcaaggagatgaaataccgtctcgattcgggacagtacgatcttctgcttgctgcggtgcgttcgcggctcgtaccgtcggaatacggtttttcgacggtacgaagcctttacttcgacacgccgcactacgggctgatcgagcattcgctcgacaaaccgatctacaaagagaagcttcgcttgcgcgtttacggcgagccggccgacgacgttcaggcgttcgtcgagatcaaaaagaaattcaagggagtcgtatacaagcgacgtgtttcgatgacgcttgcggctgctcggatgtacctttcgggcgaatcgtacgagtgcgcctgccgtgccgctccgatcttcgatcagcaggctgcagcgcagtcgctttcgccccgcagcatccaggtcgcccgggagattgattttttccgcgagcgttacgaaagccttgctccgtcgatgctcgtcgtatgcgatcgctgggcgtacgctgatcctctgggcggcgaacttcgcatcaccttcgatgcgaacattgtcgccgaccccgaagcaaaagacctccggggttcttgcaatccgcctttgctgctcggtcccggcgaggtgattatggagataaagaacgcaggtcccctgcccccgtggctcgccagcgaactcagcgcgcaccgagcgtatccgcaatcgttttcgaagtacggcaccgcgtatctctcgctgctgggcgatgcgcacgaggccccgttgagaggggcggctgcctcgttgccggcgcccgctcgtgcggtgcggggcgatgactctgcgtttggccgcgccgccttagggtttggaagcgcggattgtcatacgggcgggattgccgacgattttgggaagcggccgttggccgctgcgcgggaggcgaaggtttctcgcgggcgccatgtgcgcgtaaacgagaggagcaggacctgtgcttgattcaatgttcacttctgttttcgggacgagcgaagcgcttgtcggaagcgtttcgtcgctcgattttctcctgtgctgttgcgtgtcgatcgcgcttggatgcctcgttgcgctcatctacatgttcaagcacaactactcgaaaaacttcgtcgtgacgcttgctctgcttccgctcatcgtgcagatggtcatcacgctcgtcaacggcaacatcggtgccggaattgcggtaatgggcgtattcaacctcgtccggttccgttcgattcccggcagcgcaaaagatatcggaagcgtgtttttcgcgatggcgatcggtcttgctacgggtatgggctacctggggcttgccgccgcgttcaccgtcatagtgggcatcgcaaacgtcgtctacgttgtttccccgttcggcaaaaagaaggagccgggcaaatcgctcaaggttgcgattcccgaggatctcgactatacgggcctgttcgatgatgtgttcgatcgctataccctgtcgcatgagcttgtcgaagtgcagaccaccaacatgggaagcctctttttgcttgaatacgaaatccaactcaagggtcccgagtacgagaagggcatgatcgacgagcttcgctatcggaacggaaacctcaagataacctgcggccgaatggccgccgcaaaggatgtgctatagccatgtatgttagattcacgtttggaaatgcggggagaaccgtcggtgcgatcgtcgcggcggttgggatgacggcaatgttgtgtttaccagggtgttcggcatcggatgcctcgacggtcgtcgctgcggatgcgactgttgccgcatcgtcggatacggcaacggcaagcggcgatatcgtgtcgtcggccaacgttgcgggtatggatttcgagtatacggatcgcgaccgggacccatcgtatgacgagtcgtcggctactcgcatcgagctgtcccaatcggcttcgattgtggaaggggcgggggcggtggttgacggatcgacggtgacgataaccgaggaaggcacctatatcgtgtcgggccagctgaccgatgggcagctggcggttgaagccgacgatgccgtgaaggtccagatcgtattgaatggtgcgaccatacacaacgaagacgggcctgccgtgtacatcaagcagaccgacaagtgcttcatcacgcttgccgacggttcggtgaacacgctgaccgacggtgccgattacgcgcttgaagagaattccgacgagccgtatgcgacgctgttcagcagggaagatctgaccatcaacggatcgggaacgctcaacgtgacaggctcgtatcgacatgccgtctgctccaaagacgatcttgtgatcacaggaggcgtttacaacgtggatgcggtcgaggatgggctgcgcggccgcgactgcgtgaagatcctcgacggcatgttcaacgttgttgcgggcagagattgcatcaagtcgaataaagataccgacgaggcgcgcggcttcgtgagcatcgacgggggaacattcgatttgacggcgggggacgagggcgttcaagccgtcacgtatctgcgcgtcatgggcggcacgcttgcgatcgacgcggaagacgatgcgatgcatagcgatctcgatgcgctgatttcgggtggcgagatcacgatcaacgccagtgacgatgcggtgcacgccgaaacctcgctcacgatcgacggcggcacgatcgatatccagagctgctatgaaggctacgaagccgagaagctctatatcaacggcggcgatacccatatcgttgcgagcgacgatgccatcaatgctgcggcggcagagactcccgccgacaaagccgctgccgaagacgcgacgggcggcggcgcccccgtcgagcctgacggcgcagacgatttggacggcggggcccctgctatgcccgaaggcggaaccgccccggctggcgaagcgcctgccagcggcatggggtcgggcggctcattcgaccaatcggacgaaagcgataacgagcgcgcgcaaaacggcgatatgcccgataacgcattttccgaaggcggcgccacgatgggcgatgagaactgccttattgaaataacgggcgggtataccgtgctcgaagccgaaggcgatggcgtggattcgaacggcaacgtggagatcaccggcggagtgttgctggtgacggggccgacaagcggcggcgacggtgcctttgattacgatctctcggcaactatcacgggcggtaccgtgctcatggtgggctcgaccggcatggcccagaacttcacgagtggagagcagccgttctccttcgctacggtaagcggcagcgcggaccagtcggttgcgatcaccgatgaagagggcaacgttctcgtgtcctacacgccgaccaagcaattcggcatggtgcttgcaagctcgccagccttcgaggaaggcggcgcctaccagctggtcgtcggcggcgcggtttccggcgcgaacgccgatggctataccgatgcgggcgcggtttccggcggaaccgcaaccgagatcaccgcttcgaccaccgcgaccggcggcatgggcggcctcggcaggggaggaggcggcatgcccgccggccagagcggcgacgtccagcgcggcatgcgctagactgtcgtatgctacaggatctcgtcacgcatgctggctgcgcgatcgacgagatcctgttttgtatgtacgtttgccttgcgatagatgctctttgcatgcgattgtactgtgctgtcgcttacatagagcagtgatgcgattctcttgtacgtgttgccctccaagagaagagttagaacttcggtttctttgtcggtgagtccgtattcgcctttcatcatcgtagcgacgactgcggcctctgagccgcccgcgtctgcttgttcgctgcgcggcaggtatttgacgacgatggaggagagaaacccaaaaagaaacacgccaagaaggaagcccatcaaaagggatagaagtccccagaaatcactgtatgagacgctgaagagggaagcgcaaaagggaacagcaagataactgatgaaactgcttgccgctgtcgggaggacgaatctgataagaatggtggcttccggattggttttcggcgctgcttcgataaggacaagcatatacagcaaaagcgagaagcacgatttgcttgtttgcatgagacccgttccagcgaaaaaccagctttgctgaaatatcgttgcgatgaaaattcccccaaacaatacgacggccaatacgactatgagtgagaacttgattctctccatatgttttgacaggcctatgatcacgagaagcgatgccgtgacgccaatgttgagcgtgtcgcggattaaggtatcgaacgagggttggtacgaaactgagccgagatttataaacccggtggcgatactgctcaccaggaaaaggacgagtacgagaacatagagactgcctcccttccgagagttccccgatgcttggttgcagcttggagttttggcagaaacctgccgtgagcacgcataccatgcaagagctgagagcgccggagctccgattggtctgatgaggtcgaagggcgaaggaaggtatgagagatatccgatgaagaagctgacggtgtacgaggcggcaagaacaagcagcaagcgcttgggcgatgcccccatttcgcgaatcaagatcgagccccacgcaaaaggcaacaccacataggcgcatgcaagggcaatggagtctgctatgaggatgccgatatgcggtgttcccgagaaaagaaaaaccaccaagctcaatgtgcttgccgcgaaacaagacgccatggggaaggcgttggaggtcaagcgtctcttcgctccttttgccgaagcgaatgcgaatcctaaagaaagaacgactgccgtggcaataaagacccatagttcgatttggctttgaatttccccgacagtcgagggagagaagataaagccgaccacgctgttcctcagcattggccaccaaaacgccatgccgagcgttgcgaaaactatagttttgcgctccccttttcccatagtgaaagaatagcacggcttgtccgctttggctcgatttgcagccgcagatttggcgcggcgaaaaggccccagagcaaaattacatgttttatgggaggcgtttccaaacccaaaaaggcttttatgggatgccctcatccttttggaatgggagcatgcgattcgccgatgcagctgtgtgctttcaggctctgccgctgtggggatggatatgattctgcggactaaggaggattcatcatggaaggtatgtatacaaggagaggattcatcacgggttcggcgattgccactacgggcatcctgggcgcctccctgcttgggggatgcagtccccaagcgtcgtctgcaggagagctcaaaagcgacggggcctttgaaaagagcgtggattggagtgccgaatacgatgttgtcgtagttggtttcgggggagcgggcgcaaacagcgccatcgctgcggccgacgagggggcgaaggttcttcttatcgagaaagcgcccgaatccgaggcgggcggtaactcgatcgcctgcatgcagttgctgtgctggtcggaggatcttgatgatgcgatttcctacgtaaaagcaatgcgcggcgactacaatacgccgagcgatgccatcatcgaagcatactgcaaggaaatggttgaaaacaaaaaatggatagaatacctcggcgctgaagagcctgcgtttgtcgaggggaagatcgaataccccgaaatggaagggtcggaatcatttagggtgataactgttcatgagggtcgtggcgacggtgcggcctataagctgtttcggcaggctgtagcggataggtccgataacatcgacgtttggtatgaggcggctggtacgcatcttatccaggatccgcttacgaaaatcgttcacggtatcgaaatcgaagtcgatgggcaaaccgtaaatgttcgtgcaaggggcggtgtgattttgaccacgggtggctacgaatcgaacgatgaaatgctcgaaagctacaatgggtatcatggatggaaatcgcttggccgctctctccataacaccggagacggcatcaggatggccatggaggtgggatgcgatctatggcatatgggaaacatgcaaacgaacaatttcgagttcgtcgatcccgatacgcttgactgcacgtggaagtacgatagcgatttaaagggcattctcgttggagggaacggtacgcggtttatcagcgaaacggatacgggagccactaatcatgggcacctcaactatgccggcacatggcatgtccccgttttgcctgaagtgacatatgaagtccttgatcaagcgatattccaaaaaggcccgctgtataaatcgtggtcgtctgatggacgggaagagatcgaaaaagggtggattctcaaagcggagacgcttgaagagctcgcttctcttatgggattcgatgaggaggctgcccaaaaccttatcgccgagacggaaaaatggaatcgtttctgtgcggaaggagttgatctggcctttgggagaaagggtgacctgagcccgatcagcgaagctccgttttatgcagtcaaattaactcatactctggtgaacacgcagggcgggccggttaaaaacgagaagggcgaagtgctcacgcccagaggcgaagcgattccccacctgtacgaagcaggcgagttaggggacatttggtcgaaccattaccaagggtcatgcaatctggggggcggcatgatattcggtcgtatttccgggcgaaatgcagctgccgcaaaaaccgacaacctgcaggagtcggttatggatggcatgcccaattttgcgccttccacgttggcggtgtttgggcaagaggttgataaatcgcagtacgaagttgaaagcggtgaaagcatcggcgtagctgaagggaaaaagggcccgattgttgtgagggtttcttcagatgggtcatcgattactggtgtggaaatacttgagcaaagcgaaacgccatccatcgccggcgatgccatcgtgtcgatccctgcggcgatagccgaaaaggggacgctcgatgtcgatatcgtttcgggcgcgacgataacgagcaaggcgattattgctgcggtggaggatgctttgggcggcgaatagctacgatatgcggctttgttcggtcgataatggccaggcgggcagatcttcgcaaagaggttctgcccgcgctgccgtccgccaatctgtgcctttcgttgattaattctcccgctgccagaaaacttctctcgctttagccgattggagtacaatgaacagattcatcaacctgcccaaacggcgagaagagaagggatctgggatggctgacataacaccagtcgactacatttggaaaaatggcgagatggtgccgtgggcagaggccaacacgcacgtactctcgcattcgctccactacggttcgggtgtattcgagggcattcgctgctaccaggatcccgattccaagaagagctacgtattccgcctgcgcgaccatatggagcgtctgcaccgcagctgcaagatggttttgatcgatctgccgtacacggtggacgagctgtgcgatgcaacggtagagcttatccgcaagaacaacctgcccgcctgctacatccgcccgatcgtgtatcgcgggtacggcgtcatgggcgtcgatccgacgggcgctccggccgatgtcgccatcgccgtatggccgtgggacagctatcttggggcagacgcgcttgagaacggcgttgccgtgggcgtgtcgtcatggcgccagcgttcgaacaacgcgatcccgcccgcgatcaaggccacggcgtcgtatatgaactcgatcctcgccaagctcgaggcgaagtcgcatgggtatgcggaagccatcatgctcaacgaggcggggctcgtgtgcgaaggcaccggcgagaacctgttcgtcgtccgcgacggcatcctttcgacgccgccgctttccgatggcctgcttgagggcatcacgcgcgacacggtgctgtgccttgccgatgatctggagattccgtctgtcgaagagagcctgacgcgttctgatctctacattgccgatgaggtgttcatgaccggctccgctgccgagctgactcccatcggaagcgttgacggtcgcgtggtcggcaagcccggcgacatcacgagggccttgcaggagcgtttcttcgatcttgtgtacggccgcatcggggagtacgcagactggctgaccgagatttagaaccgatcatgaatcaaagcgaagccgcttgtgcaccgtttcggcggattgcagccaagcggtttcgttttccccgtacgtgcaggcgctcttttgttgcgaccgcgtctgcgcgatgaagcaacccgccgattctaaagggagcgaagccgcatggaacagcgcatactgacatacgacagcacgctacgcgacggggagcagagcgagggcatcacgctttccctcgaagacaaactgcgcatcgtcgagcggctcgatgccttcggagtcgattacatcgaaggcggctacccggcttccaatcccaaagacatcgcattcttcaagcgcgtgcaggatatggatctcaaacacgcgaagatcgccgcattcggatctacctgcaaaaagggtacggctcccgaagacgacaggggccttgccgatctgctttcgagcggagcgccggtcgtcaccatcgtgggcaagacatgggacgagcaggtgactcgcgcgctcatgacgtcgcttgatgaaaacctgcgaatgatcggcgagtcgatcgcctacctcaaatcaaaggacgtgcgcgtcgtgttcgacgccgagcacttcttcgatggatacaaggcgaactccgattacgccatggcgtgcgtttcggcggcaagcagcgcgggagccgattcgatcgatctgtgcgaaaccaacggcggcgcccttcccttcgaagtggaggaaatcgtccgtgccgtcaccgaagcccttcccggccagcagatcggcatccactgccataacgacacgggctgtgcggttgccaacacgcttgccgccgtccgtgcgggcgcgacgcaggttcagggcaccgtcaacgggttcggggagcgtgtgggcaactgcgacatcctcacgaccatcgccgatcttgaactcaagatggggctgtcgacggtgggtcctgagaacctgcggcagcttacggcggtatcgcagttcgtggcggagacgtgcaacatgtcggttccgacgcatcacccctataccggtgcatcggcgttcgcgcacaagggcggcctccatgcgagcgccatcgcccgcttccccgaagcctacgagcatgccgacccccagcttgtcggaaacacgacccgtatgctcgtcagcgaacttgcgggcaaggcttcgcttgtcgcaaaggcgaagagcctcggcatcgatctttccgataaacctgaaaagacccaggagattctcgacaccatcaaggagcgggagcacgaggggtattcgtacgaagttgcggacggttcgcttgcgattctgctgcagacgcatctcggcaggttcaaatcccatttccggctcgagagctttcgcgtgattgtggacgactacgaggattctggcgctcgggcgaaggatgccatgagcgaggcgacgatcaagatccatgtgggcgatcaccgttttgtggcaacaggggaggggacgggtcccgttggtgctctcgataccgcactgcgcatggcgattaccgagttctatcccgaagtcgcgggcatcgagttggtggacttcaaggtgcgcattctcgacgagaatgtgggaaccgatgcgattacgcgcgttgtcatcacttcgcgcgatgcgaacggcgtgtggggcacgatcggcgtttccgagaatatcatcgaggcttcgtggaacgcgctcgtcgattcagtcgaatacggtttgatgaggatggggagataaatgagcgatctcagaacacccgaggttgagaacctcgctttcgcacttgcgaagatcgatgatcccgataccgtgttcgcgcttctcgaggacatgtgtacgattcgggagatcaaggaaacctcccagcgcctcgacgttgcgcgattgcttgccgcgggcaagtcctattcggctatcgagcagataacgggtgcgtcggcgacgacgatcgcacgcgtgtcgaaatgcctctcgtacggctcgggcggctatgcggccgctttggaaatcctcaaggagcacggcgagtagcgtccgtttcggaggcggcgaatcacgctcgaggatcttggcggaccgcatatcgcacgcagagcgtttcacggcaggtctaaggcgaagccctccgctgcaccttcttgtatgccaagtaaacataagaacttctatatatggataaatcttgtattatggtaataaattatatattttactcggaagtacgcgataatacggtatatttactataaaataagtatcaattaaaggggattcttttggagcgaggcggtggcgcggtatcgggcaaacacgctgatccggtttattaccgtgtccttgacgacgctctgtcgctttcggagaagatcgagcagatgggcaggaaacggttcgacgagctgacgggaaggcagatcatgtttcttgccatgatcagctcgttcgacgaaaagccctccttgggagatatggcgcgcaaggcgcgatgctcccatcagaatgcgaaaacggtgctcggggccctgcacaagaaagggttcctcgatttcaaactcgatgccgacgatcagcgcgttttgcgcatccatctgacgaaaaaagggagaaccgtcggcttgcgtgctttggaagagctcgacaggctggtgagccgcattggggaaaacgtcgatcgcgaagccgccgaggcgttcgccgatgtgatagccgagctgtccgaagcgttcggcggcacgttctcgcttatgggagacggccaagaggagcaggccgcattgtagcgagccgtttgccgttctcggccgacccgtttgcccttcgcatcgttcggtcgcggcacgaatgccgggatcgccgcagcggatggcggcatccacgatacaataacctctcaatgaaaaggtgcgccatggcggcggcaggccgaagggccgtgcgcgcaggcgcaatcgtgcggcgaagcgccgcgtgaggggaatttcaatgagcatatcgacaacgatgcgcgccctgcggggcggcgttgcggcgattgaaaaaccgattcggatggcagatggcaaaactatggaagacgagccggataaacagggctcgaaacgtattggcaaggggcgggttgggagctttctcgaacgcaagaatatcgagatatccccaaagcgctacggggtcgatgccctttcggccatggcgcagggtctgttcgcgtcgcttttgatcgggaccattctcgcgacgatcggcgagcaggcggacatcgaatcgcttgttgccatcggcggctttgcgaaggcggccacggggtttgcaatggcggtgtccatcggcttcgctttgcaatgcccgccgctcgtactgttctcgctggcggccgtgggcggtgcggcgaacgacctcggcggcgcgggcggtcctcttgccgtgttgatcgtgtgcatcttcgccgccgaagcgggcaaagcggtttcgggggagaccaaaatcgacatcctcgtcacccctgtcgtcacgatttgcatcggcgtcgggctgtctctgtggtgggcgcctgcgatcggcgccgccgcgagcgcggtgggcggggccatcatgtgggcgaccgatctgcagccgtttctcatgggactgatcgtttcggttctcgtcggcgttgcgctgacgctgcccatcagctcggctgcaatctgcgccgccttgggtctcacggggcttgccggcggggcggcggttgccggttgctgtgcgcagatgatcgggtttgcggtcatgagctttcgggagaacggcgtcggaggtttgattgcccagggcgtcggcacctcgatgctccagatgggcaatatcgtgaagaatccgcgcatctggattccccctacggttgcggcggccatcacaggtccgcttgcgacatgcgtgttcggcttgcagatgaacggccccgccgttgcgtcgggcatgggaacgtgcggccttgtgggccagatcggcgtgtatacgggatgggtcggcgatgtggccgccgggctgaagccggctgtaaccgcgttcgattggctggggctcttgctcgtctgctttatcctacccgcggttctcacctgggctatcggcttggtcttgaggcgttggggttggattgggcaaggggatctcaagctcgatctgtagttgtctgcggcagtcgctgcaaccagggtccgccatttgtccagaaatatttgtaatatattctctagaaagaagaagcgtggtattctatgtaagatattactatctgatgaaaggaacaccatgccatcagacactgcgtttcttcgaatttcgaggcgtgcgcttgcctgcgcaacggtgctgtgtgcagcgttgcttgcgctgtcgttcgctccgaccgcccacgcgacggtgacacttgaggggaacccgcctgaagcgcttgccgatgcgggaagcaacgagctgttcagcaagcgaacgtataccgaatcgaccatcccgtacgcttccgaaggccgagcgtactatctgctcacgcaagatgccgcctacgcttcgtacggcctcgacgatacgaccgcggttcagtacggcgggcaaacctatacgtgccgcgtcatataccgtgctgacggcttattcagttccggcggtggcttgacggctgcgggcggcttgttgaacggacgagcgtatccggccgaaggcgtcaccatcttcgtcgagggcggcaccttccataaccaacacgagaacaactacacggcgctttcaggacccaatctcgccatcgtcgggctgaccgacccgagcggcgataatccagcagtcttcaccaaggctccgcgcacggctgcaaatcccggtctcgagcgctatctgctgaacgacccgaacatgcgctacgagaatctcgtgttcgacggacagaacaacggcatgtcttcggcgagcagccgaggccactacttcatttccgtttcagcgggcgataagccgttctatataaagaactgcacgcttaagaacgtcggctcgtcaaacaaccgctcggcgatcaacctggtgcttgcgaataccgggcaggtcaacctcgaaaacatcacgatcgacaacattaaaacgagtgcctcgtatgcctacgtgcagctcaatgccggcatcaacgtcaacgtcgataccatcacgtttctgaacgccaattcgacgaagcgcctgtacttcgatcacacgacggcagccacggtcggtcagcttcgtcaggcgaacgcggtgttcaggggctccctcgcgactgatgcggcgaacaactacgtaacggtgcgcagctacttgctgggagaccttacgctgccttccgattaccgttatgcggtcatgaatacgagttcgagcagctttacaaccgatacgatcagggtgtacaacgatcttgcgaacattgccgacaacgctacgagcccgatttacgacattgtcgataagacgtggatcgtcagatcgggaagcgcttaccgcagcgtcgaatcgcagctgcagggcatcaacacggtgctcactcgggcggcgcaggcgtatcccgccgacggcacgaccatgagcgcgacgttcgggcgcggatggaccacgaaggcatacatcaagctcgtggccgacgaaaacggaatcgtgccctcgttcaaagtccctgcgttttcgggaacgttttgcgatacgacggaaccttacgtgctcatccgtgcggtttccgatgcgtcggttccgttctcgcaggctatcgacgaggcgtctctggttccgttcggcaaggacagctcggtcgagatcgatgcggcatcggccgataaggtgcgtttcttcggcatcgatttccacggggtcgatcccgtcatcgagaacaacccgcgaataaccctcgagcgtgcgcacacgggcatagcatccgcttcgaccgatccggtgttctccaatgcgacggacgattcgtttgcggcatgccggtttacgggcttggtgaacgatctggccgtcacatcgccagttttgagcagcggaaaagctacggtggagttgaaggacggtccgtttacagctgcggctgtgccgggtaacgtgttcgcctcgcaaggcacggtgttgcctgcaaccgaatcggccttcgccgacgatccttcgcttgcgtgggagtcgagcgatccgagcgttgccgccgtcgactctcagacgggggaggtgacgccgctcaaagtgggcacaaccaccatcacggcgcgtgccaacgacatgcataatgcaggcgagctggaaaagccgggtgcatcgtttgagcttgagattctcgatacgcccgatcctgtcgatccacccgacccgatcgaccctgtcgacccgattgacccggttgatccgaccgatcctgtcgacccgaccgatccggctgatccagccaagccgattgagaaagcgaaaacgggtggcgacaagctcgcccaggtgggcgaccgcgctccgcttgcggcgggtgttcttgctgcggtggcggcgggagtttgcgcgatcgttgccattcgcaaacgaaatcgggcctaaatggtttcatgtggataacaatatgttgatagcacggcatcagattgcataagtagcgggctttcatatccaaagcgcccatcattagtcgtaacacaaagattacgaccgaaatggtggttgctatgaaagcccgtacaaaaagaacagtgcttgcctacgcgatggcggtactgctggcgttgaaccttttaccgctctctgcatttgcggaggcttccgatggggagcggaccgctcaggcggtaagcgatcgcgtatcgaattcgcctgtcgggtccggcgataatgcattgacagacccgacagcaaaccggcaaacagtcgaagccgccgatgaagtgcctgccgaaggcgctttggacgacttttccgaagagagcagcggggggtccccgtcaatcgatgactcggatggggttgctccgggcggcgaatcagacggggcagcttcaggattgcggaacggctcggaatcggcggatcccgaaagatccgccgattccgatgacggcgcggcgcttcttgccgccgatcccgtcgatatttcgacgttgctgccgccaagttccaacggcaccattctcggcggcatgaccgtcgagatgcgcgatgcgaacggcaatccactgcctgcaggccaagatcctacgattgattcgatcattcacctcggcttcccgctttctattcctgcagatacgaccgaccagataaaggcgggcgattattactccttcgagcttcccgatgcggtaaccgttccgacgggcatcaaaagcgtcgctttggtcgatcccgatgacgcgagcatcgtatatgccaatttcacggtgtcaccctcgaagccgggcacgcgcgcggttgtgaccatcacgttcaccgatgccgtaaccggcaaaggggacgtgacggggcagatgggtttttcaggtggcctcaatgccgatgcgatcggcaagcccggcgaaaccgagataaagcttcctttcgagaatagcgttccccccgcatcgatcaccatcgttcctgcaaccgacagcgacgtgagcaaatcgggcaatttcgatcagcctcgcaatcctacaagcatctcctggtcggtcgatatcaacaaatcgctcaagcagatgaataacgcctctgtcgccgaaagctttccttcggggcttacgttcgaaggcgtcgaggtgtaccaggttcccgtcgatttctacggcaacgtgatcggggaaccgggggatgcgggctggacgaagctcgatgcggttggctatacggcgtcctccgacggtacgaaggtgacgctcaacagcccctatgattcgacgaaggaagcttatcggttcgtttacaagacgacgatcgaagatgatgtcaaggacctgagcgggggagacgtcgcgtttaccaacaaggcggtgcttcattccgacgatacgggtgcggacggccttccggcgcaagcaacggttagcgccaacttcggaaaaatgatcgacaagaaaggctcaacctacgatccctcgacgaggctcattacctggcaggttcagtacaactacggtgggcgcaccataccggcaggcgacgcctgggttgaagacatctgcgattaccccgatttggagttcattgccgattctgtgaccgtgcagaaaatgaagttcgattccaagggcaacgccgtcgttgaaagcggtttgtccgaaggtgcgggagccggccagtacacgttttcgcaggatctcggtagcaagagcatcaaggtggggttcaacagcgacgtcgattaccctgtcctcatcacgtatcagaccaaggtcaccagcgtgatcgatgcgaacaaaacctacgtcaacacggcaatcacctcgggaaatccgccttcgatcgcacatgatcggataacggtcggccagcataacctggtcaagaccgtcgatggcgtggatattgcgaacaagacgatcacgtggaagatcgacatcaacaagagccgctatccgatgcaatccttcacgctcaccgacacgcttgtgctgggcctgtcgcatacgatatcgaacggtgcgaacatcgaggttcatgacgtgactgcgggaaaggctgttcccgaggcgggcgatttcaccggtgacgggtacactcttcgtctgagcaccgattcctcgggaaaccatataggcttcaacttggccttcgtcggctcttacgggagcaccgatcacgaatttgcgatcacatacaagacatcgtacgacgccatgcacaatcctcctgacggtagccaggaattcgtcaacatcgcaagttcttcgtggtacgacgcatccgggggtcaccactccaataccggtcgggcatcgtatcgaccgacgcctcccgacggcagcaacggcatgaaatcgggctcgtacaatgccgtcgacaagaagatcacttggtcggttcttgtcaattacgcccggaccggactgaagggagcttcgatatcggatatgatccttcccgggcagacgttcgtcgacggctcgctttcggtgcactcgtacaccattcgctcgaacggaacgacggtcaagggccccgagcttactgccgagcagatggcctctctcgacgtgacgctgccgagcgacgataacgagcagacgctcacggttgggttccccgatggcgacgagctgtattggatcgagttcgacacttcggtcgagggcacggtcatcgaagctgcctacgacaacgttgccattttgcacaacgaagcggagagcgtgaaggacacatcgctcaaggcgaaggtttcggtgaagcacggaggatctcttgccgagaaaagcggataccaggattctgatggcgcggcggtatggagtctgacggtgaacccgaacaactccaagctgtcggacgtgcttgtaacggatacgccatcaaacaatcagttcgtcaatctcgattcgattgcgattaacggcacgactgtcgacaaagcgggcaatttgacgctcgacccgtcgtcggtgcttgtcagggataccgactatacggttgattacgtgcaggacgagaacggcgtgtggcagctgaagatagcgtttgccaatacgatcgacagcgcctacatcgttacctacaaggcaactctgtacgccgattcgagcgtgccgctgagccaggcgaccaacacggccaccatcacggggaacaatctgaaaaccgttaccgacaatacgacaggcagcatcctcgtgcagcttaccgacggtagtggaatacttaaaggtacgcgcaaagacctcattctccataaaacggatctggacggcaaagatctgactggggcgaagttccagcttttcaattcgcatggtcagccgatcggaggagtcgtatccaccgatgaaaacggcgcgatttcctttgccggcatagtgacgggaacctacacgctcaaagaggtggaacccgcacccggctacaccatgtcggaagagcttgccgcgggaatcaccgttttgctggaagccgattccggtccggtggagataaccaacgatttaaccgaggtgaagctggtcaagcagaacaccgaaggcgcagcagtcgggggcgcggaattctcgctggagcgttttgacggcggcgtctggagttctgtcgcatcgctgcccgagcccctcgatctcgtttcgaaggcggacggctccattgtaattcgcggactcgaacccggtcattaccgcttgagcgaagtggcggcgccctatccctacgtgctgggcgagccgcgcgaattcgatgtatcgtaccgcagcgacgatgtgaagatcgtcgatccggttgatctgggctcctacgttaacgaacgattcgccgcaacgctcaacatcctcaaaaccgatgtcgatggcgcgccgcttgccaaagcggagttcgagcttcgggacctatcgggcgcggttgtcaaaggcggcatcgtcaccgggtccgatgggcgcgcatcggttgccggaatcgatgaagggtcgtacgtgctcgtagaaacgaaggcgcccgagggctatcagctcgatcagactccgcatgaaatcgaggccgtgtacgatcaggcggggcagacgatagaaatcaccctcgtcaaccttgccgagccgataccgcgcattcccgacgttacgaatccgcccacgactcctcacccggcagattctccgaagatgccgaccccagtaggcggccttgctcgaacaggggacgggtatctggccgccggcatcggggcgtttgcggcgcttgccgtggttgccgctgcagcagcgggagcgcttgcccttcgacggaggcgtagcgccggcgaataacggcgagtgcattggttgcttctgaaaacgagaacccggttaagacggccgggttctttcttatatataagtgaaacaataatggttatgcaacggggcgaaaacgcgcagaccacgggcgcaccacgggggcataacgcggaaattactaacgtaacagcaggtcaatcggtagtttgcagaacgcccataggtctgtgaaccaccggtcggatggagtagggtgagacaacaccaaaagaagccccgtcaaaaaagacggcgtcttcgaccgaagagaaaagaggacggtatgggagctttcagacgactcgcctttttcgtttacgctttcgcgaccatactcggcgtcggttatcttgcccttctgtggttctcgtgggagccgcttatgccgactgcaggatggcttgcgggtcagcagtggtttttcgtgttcgaggcggttctgctcggtgtcgtgcttgcaggaacgctcgtcgtgctcgttcgcgcgatagctgcaccgcctactgcatcgcggctgcgcatcgagcgggatgccggtacggtcgatatagcccgcgatgcgatcgtgtcgactgcgcgcgacgcagttgaatctcatcgaggcctcgcggtgaaagacgtgcacgtgaagattgtcgggaagcgcgatcctcgggtgagactgcgcatgaaagtcgatcctggtcgcagcggcatgctcgaacagctcggcagccgtctgaccgacgaggtggcggcatcggttaacgctttgaccggccatccccttgattcgctgcgcatttccttcgccaagccggatggccgccatgcgtctcggacatcagccgttgctgctgctgcggcctcgcctgccgcgccgatcagccccacggaagcttcggctggccgactttctggcgcttcggacggctttgggacgacgggcgcttccgaatccgtctatgcgcaggctgcgccgaatgcttcggttgcgccggaggctttgagcttcgacgcggaggatatggcagacgaggcagttgccggcgctgaaggggcttcattcaacacagtggcggccatgtcgcgataggaggtacgcaatgacgcaatcagcaacgcttatcccgcccgtgcaggcgcagtcggtacaaggtgcgcacgatcgattggggtatccgaacatctcgttcgagcccgatcgaagcgatgcggaaaagcccgaagggaagcccgtgcgcgcggcttcgcaagaagagctgttccccaacgcgaagcacgcgtggttttcgtactaccgcacccaccgtaaccaggtggtctgcgcggccgttggtcttcttgtggcggcggggtttctcatcatcggattttggccaaccttgcttctggcggtgtttgcatccgcaggcgttttgtacggacgctacaaagatggagatcgcaagacggctgctgccgtcagaggcatcatcgatcggttggactagatcataagcaaacgcagagcgaaaggagccagttatggcgcaggaaacaatgagcacttcaagcaccatgagcccgacgaaccaaggcatcggcaccgccccggtggccgaacccgagtacaagcttgtaatagacgaggtggtcgttgagaagatcgccgcatacgcgacccagaaaatcgacggcatcgtcgagatgaagggcaacctgctctccaccatccaggaggggctcggcggggaagaccgcacgaaaggcgtcaacgccgatatcgaagacgaccagcgtgcatcggtcgagctttcggtcattctcgagtacggcaaatcggccgtcgaggtgttcgatcgcatcaagaaggtcgtcggcaagagcatcaaggaaatgaccggtctcgatgtcgaagagatgaccgtccatgtggtcgatgtcatgacgcgcgacgaatacaagcagaagcagggcgacgatcgtgcccagaacgttaaagccgcgtaagccaatcggaaaaggagcatgcaatgacgtatacaacaggagaaaagccgggtaagggaacctatcgctgcctgcattgcggacagctcgtagagctcaaaagcgacgacgaccagctgccgccgtgcccgaactgccatcatgagaagttcgagaaggtgtcatagccgaccgcatcgtcgcgaggctggaaatcatgcgggatgcgggcacggcggcatcccgcattttcatgcgcagtcgccttcggttcgtgcatgcaaaacgaaggtatctgctatgatgaaccaaatgagatacgtcgccgctttgcggagcgaacacccttgaaggagagaccatgccaacgaccttattcgtcaacgcctgcatgcggggcgcgcaatcgcgaacgctcgaactgtgtcgcgaatatctggcggcaaagcaggatgtggcggaggttgacctgagcgcccttcggcttgtgccgttcgatggcgctgccgccggtcatcggtacgatcttcagaaagccgggcggtgggacgatcccgttttcgacctggccaagcagtttgcttccgccgatgaaatcgttgtgggcgctccgtactgggacctttcgttcccggcggcgctcaaaacctacatcgagcatgtttcggtgtgcgatatcacgttccattataccgagcaaggccaggcggagggaatctgcaaagcgcagaccctcacctacataacgtcgtgcggcggttttgtcgaaggggcgaatttcggctacgagtacctgtgcggcattgcttctatgttcggcatccccgaaacccggttcgttgccgccgaagggctcgatgtcgttggaatgaacgttgaagatcagatgaacaaggcgcgctccatcattgccaagctgaacgggcgatgagcactgaagtttcgcattcgctgtccattgcgataatggtgcagcgtgcgctcaatctggttgacgaacgcttggtggatcatgggcttcgtgtcgcgctgagcgtcgatgccatgctcgagcgcagcgggagcctttgcgccgacgaccgacgcgacgcgctgcttttggcgctgtttcacgatatcggagcgtatcggaccgaggaaatcgatcggatggtcgattttgaaacggagtcggtgtgggagcattcggtgtacgggtatttgttcctgcgcgagctctcgcccctgtcgcgcctttcggaagccgtgctgtaccatcacctgccgttcggtcgattcgatgggatcgatccggttgtcgcccatatcgcccaggtgattcacgttgcggatcgggtcgatgtgtttgcgctctcccatcccgacgggacgcgcgagcagctgtaccttcaacttgagcaggcgaaaggcgccttgctcgctcccgatgccgtcgatctcttcctcgaagccgataaagcggtcggcccgggaggcctcgtgtgcgagaatgcgggcatcgagcggctcttaggcgcgtatcccatccccgacggcgatgcatctgcgtttctcaagatgctcgtccacgtgatcgatttcagaagccgccataccgtcgcccatacgatgacgacggcgcagatagcctacagcgttgctatccgcctcggccttcccgaagacgcctgcgaggcgatatacaacggagccatggtccacgatcttggcaaaatcggcgttccgctgaccatattggaaaagccgggagcgctcacctctgacgagcgcgatgccatgcgcatgcacgtcgatctgaccgagcacataatcgacgggtgcatcgaatcgcgggtggcgcgcattgcgctcaggcaccacgagaagctcgacggctcgggctaccctcgcggcttgtccgctcccgatttgtccgagcccgaacggatcgttgccgtggccgacatcgtgagcgcgctggctgggacgagaagctacaaagaggcatatgctggggaacgggtcgtttccatcgtgggaggcatggcgagcgacgggctgatcgaccgtcggacggcatcgacgctcatcggcgactacgatgccattatgcgggaggtcgacctcgtttgcgcgccgatcatgagcgcctacgagcgcatacaggaggagtatggtacccttatcgccaagttatcttgaaattgcgcgccgaagtgcgctgatgcaggcgatgaggaacggtaatgaagaagcttttgattgttgttgatttccagaacgatttcgtggacggggcgctgggctttccgggtgccgagttgcttgaggaccgcatagcggccaaaatcgatgcgtatcgggaagccggcgacgagattgcgttcacgctcgatatgcatggcaaaaactacctgaacacgcttgagggcaagagtcttccgattgagcactgcatcgaaggcacgccgggtgcagagctgtacggatcgatcgccgaacgcgtcggggcgtgcgatcctgtgttcgaaaaagcggcattcgggtcgaaagagctgttcgggcgtctggttgcgatgcagaaagttgccgatgaagtgggcacgaatcccttcgagagcatcgaactcgtcggcctggtaaccaacatctgcgtgatcgcggaagcggtgcttgccaagacggcatgtcccgaggttccggtcatcgtagatgcgtcctgtaccgattcctacgacagggaattgcgggacaaggcgttcgacgtcatggaaggcctgcagattcaagttatcaaccggtagctcccatcatcggcatcgctgcagttcgttgcgcgcatcgcgggcgaatgattcgaggatgagctggcagcgggttcctatcggcgtcgtattgtgttcgagaaaactcggcacgtcggcgatggggagcgtgaatacctcgatgaactcggagggctcgggtttgggttcccgttcttttttcacgaaggcgaacacgacttgcacgctttcctccgaaaggcctgtggacgaatagcctgcctggggaagcgggtggaatttcggctttccgtcaatgaggtgaaagccgtaccccgtctcttcgtacaattcgcgctcgaggcattctctcagatcttcgccttcttcgatgaggccggcgggaaaggctatgcaccagctgttgagcggatagcgaaattcgcggatgagcacgagttcgtcatcggctgtgcgcgggacgatgcagatggcgtcggcctgctgcgtgcccgttcccgctctttcaagctctttgcgatacgcatccaatccttttcgggaaaccgcctcataggtgtaggggcttccgtctggcatcgtgtacgtcagctcgtatttcttgatccagccgtcgctcacctgcttgatgtcgcgcagggcgggggcggatcggtttgctggttggtcaggggtggcggtttgctcgggcgcgggtgcgtctgccatggcgatctcctagaaatcgaaaacggatccgacgtttgcggcgatgcagaggtcggcttgtctgtcgcgcggggtgggcgtgcggttgatgatggccagatggtctcccgtgaagtagtcgatgagggttgcagctggatagacggcgagcgaggtgcccgcgatgatgagtgtgtcggctttcgctatggcttcgaccgaagcttggagcgtatgcgaatcaagcgcttcctcgtacaacacgacatcgggtttgatgatgcctctgcattcagcacagtgcgggacgccgtcttcggcctgctcgtgcaaggcgagaagctcgttgacgctgtggggcttgccgcatcgcatgcagaagttgcgcagtacgcttccgtgcagctcgtataccgttttgctgcctgcggcctggtggagcccgtcgatgttctgggtgatcacggctcgcatgattcccttccgttcgaggtcggcgagctttcggtgcgcttggttgggcttcgcgtcggcgaacaccatgcgatcgcagtagaaatcgaagaactcggggggatgctcgtcgaagaagcttctgctgatcatgacttcagcggggtaggggtatttttgagcgaacaggccgctggggcttctgaaatcgggaatgccgctttcagtggatacgcccgctcctccgaagaacacgacgccgccttgcggcgcttcggcaatccatcgtctgagtgtctcgatggctttttccgtttcgtcgttttcggctgccatatgccgtcctttcccgctgcgttcgcgtgcggcattgtctgctgccgacgcagcgtcgtgcgaccgcattcgatacgggcaatgatagcaggttgttcgcgttgcgtgtttgcttcgatcgcgcgcgtgcaagcaaaaagcagggcggccgagcgaccgccctgcataagcgaatccagctttgggcgatcagccctcgatcgaaatgactttcttggcatcttcctctttgggttgttcctttttcggaaccgtgatcttcagcaggccgtcttcgaatttcgccttgatgtcatcttcggaaatgtcttctccgacatagaagttgcggctgcatttgccgctgaagcgctctttgcggatgaacgtgccctcttcgcttttctcctccttcgatgattcggtggaggcgctgacggtcaggtagccgttcttgagctcggcggctacgtcgtccttcttgaatccaggcaggtcgatggtgagctcgtaggccgcatcggtttccttgatatcggttttcatcagggttggtgccggctttgccaacgcggtcgcgttgtcgaggaacgtttcgaacggatcgagcatcaaaccgttgatgaaatccttgggtcgtcttgtaggtactaacattgcgatcatctccattcttttaacgcgggctgcatcgaaatggcatcgcttctgtcatgggtgtttcgcccgcttgccgtgtacgattccaggtatactcagaggtgttccacccgtcaacggttcggagtcattggtaactgttttgtaatcttgatctgggcgcatgatacaattaccacatggataaatcactgaacagcaccgcgggtttctttcggatcggacttgtttccgatacgcatgggcagcttgatccgaaggcgtatgccgcgcttgcggaatgcgatcacatcatccacgcaggcgatatcgggggtcccgacatcattcgaagcctcgagtcgcttgctccggtaacggcggtgctcggcaacaacgactacgacgaatacggagcggcggtaggtcggttcgctcatcccgtgatcggaggcgtccggcttcttgtggcgcattacccgcaggatgttcgcatcgggttctcgggcggtccgggcattgcgccgggagaccccattccacgggtctgcgtacacggccatacccatgtacccgaaatcatcgtgggcgcagatgcccgtcccgccgattacgtgatatgccctggcgccgcgtttcgcccgcgtggcggctttccccgttgcatcgggtacctgttcgtcgaaggaggtcgggtgctcggtgtgcgcatcgaatcgctcgacggagacgtcgtgttcgaaacgggcggtcgaaactgagggcggcgggcttggccgcaacctgaaaagcggcgtgcggcggcatcgtgcgtgcgcttcggcagccgcttttcgccaatgctgtcgggatcagcaatcgacttggacgatctcgcctgtttcggagtccatgatccagcccgttacgcgtacgagcggcggcatgacggggtgctcgcgcaccatcgccacgctttcgcgcacggctttttcggtatccccgaatcccgcaagccatcggttgaaatcaacgccgcagtgctcggcgagtctgatgcggtcttcggcgacgcctaggctttccatggcttcgaccatcgatgagccgtccatatgctgggcgccgcacgaggtgtgggcgactatcatgacatcttcgactccgagttcgcatactgcgatgaggagcgagcgcataacgctgccgaacgggtgcgacacctccgcacctgcgactttgatgatcttcgcatcgccgttcttcaggccgaacgcggcgggaagcagctcggtgaggcgcgtgtccatgcaggtcacgatggcaagcttcttgtcgggatacttgtcggtgcggtagcgctcgtactctttgttcgctgcgaactcgcggttgtgcgcgacgagcgcctgtatggtgggggagaggacgccgtgcggttctgcgacggcggcgctttgttcggatacgttgttctcgtgcatgggatacctggctttctttgctgaagcacccagtgtagcgcaacgccttcggcaaaggaaaggcgctccgcgaacggagcgccttggattcgctggttttcggtttgcttctggttggcttagaaggcggtgaacttgtccttcgtgcaaaagcagatggggcacttttcgaaatcttcgcccttgtggatgtagccgcagatggggcagaggtagaacgtatcgtcgtcggcggcgtcgaggttgttgtaggcatcgaggtagcgctcggcatgcacggactcggcgagcttggcgcgggtgaacacctggactgccttggtctcgccctcttcttgggccttcttgatgaaggcgggatacatgtcggaggtctcgtagatctcgccacaggcgcccgagatgaggttcagatcgctggcttcggctgcgggggcatcggcggaaggcttctcgtagtcgggatccatctgcgaaacgaggccgtactcgaggccgatgtggatctgctcggcggctgcggttgcctcgaacaggcgggcgatctgatcgtaaccctgctctttggcggccttggcgaatgcggtgtacttggccgaagcgccggtttcgcccgcgatggcagccttcaggttgtcgagcgtcgaaccgaccacggtcttgctgtcgctgacgatgttgaaattggtggagttatcgggtgaagggatggcgtcgcgaagcttcattgtcattgagctctcctctgtgttgttattgggtctcgtctcttattgagaacatatctcgataaggtatactacaccgtccaatcgagcatttcaagagcaggatgggaactgcttgcgacttttcccgagtttgcacaaattctgcgaatgagctttttgccggttcgatgcgatttcgggtgggcggaggcgccgatgtgcggcgggcctgcgattgctttacgcgcggtcgggcctgtcgttgcgggaaagggcgaccgcttcagcggtcgcccggaagatgaagcgcggtacgttcggctatgcggaaaggcgctctgccgcaagcctacccgatgtcgccgcccaaccttgttgcgatcctgagcatacgtcgacatcgtaattggaaccgtagagcccggcggcatcgcctccagcagcgaagagccctgcgatagcatgtccatcggtgtcgatcacttgcatgttttcgttgacgctcagtgcgcctaccgttgtgaacagggtgggggtgatgacggccccgtagaacggagccgtctcgatcgacagcagctgctccgctggcttgccgtagtcttcgtcggcgcccgtcgcgcagaattcgttgtaacgggccacggtttttgcgagcgtatcgggttcgagccccaattggtctgcgagatcctcgatagtgtcggccttgactatgcctgcgcacgattcgataccctcgcggcattcgaagggttggccgacgaatgccccgaggttcggcatcgggcagaacggcccttcctgttcgatatggtcgatgtaggcgtcgtcgaatatgacgtagttggctgcattggtggtgaggacgttgcctgttgcggagaaatcgctcgtgaccgcttcgttgaagtaacgttcggctgatgcgttgacgcgcatggttggttgcatggttagaacgaagttgggtatgtcggaaaatgcgtcggtgccctctatgcgtccagtgtggtacatgacggcgcttggaatgtgcgtatcggcattcgcggaagcggttgccgcgatgatgccatcgccgtctcgtcccgtcatgccccaaacatgaaccgaatcgtaggggcggccggtgaacttctcgaacaactcggcgttgttcgcgtagcctccgcttgcaaggaccaccgccggcgcttcgatgagcgtttcgctgcttcccgacccgatgtagacgcctttgacggttttgccatcaacggcgaggtcggtcatgggagccgatgtccggaactcgacgccgagcgattctgcgtttttctgcagcacttcaagaaccgtctgcatgtgcgttggagcaccggcctggtcggcaggcaggtgccataccggataagaatcgccgagcgccacgactgacgaaaacgtcacgccctgctcttcgagccagtcgatggtttcgccgcagttgtcgataaacgagcggacgacgggaccgaggcaggcgtaatggtgatagttcatggtgtcggcgagcacggcggctcggtcgacttcgatgccttgttcggcttggtagcgcgatccgattccgcagaggccttcggcgaaaacggatgttccaccgagccccgagttcttttcaaggcacacgactttcttaccgagctcagccgcccgcaaggcagcgcaggttcccgctgttcccgatccgaccacgacgacgtcgaactgttcggtagaagcggggttgtgctttgcgccggccggttgacttgcttgttcggtctggtcttttgccggtgtttcgccggcgggcgagcagctgatcagtccacccgctacgatgcctgcgcctgcaagcagcgatcccgatagaaacgatcttcttgatatgctcataggtatctcctcctcatttggtacagtgtaccatataatagtggtacactgtaccaaagtcaatacccgcaagttatgggcgactcgacgggaacaccgtgatgccatcggccaagcggctggccttcgctataatgggcgatacgttagaaaggcgaggtacatggctcaagctgctcgaaagggcaaatcgctcacaaatgaagaactggcgaaagcggcgctcgaatacgttgacgaagagggcgtggacgcgctttccttccgtaaactgagtgatagaaccggcgtgcccacgatgaccatcatgaaccgtttcggttcaaagtacgacctcatgaaagccgctttgggggttatgcttgatgagacgatcgtcgagccggttgcgggggagacgtggcaggaaagtctgcgccgcgtcgctcgcctgaaccgcgccatggcactcaagcacccgaaggcgttcatgatgttcgtcctcgtgcccatattcgagtcccctgttctcgagtttaccgaccgcgtgttctctacccatgagagccaggggctgcccgaggagatgcctgcggtgtttctgtcgatgatgcattcgttcctccccggtttccagcttgccgaggcttatgcgaatcgggagcgcgatcgggtgggtgccggcgcgtccgccgaagcgatcgagcgatttgatcttttcaccgaggaatcgttcgaccgaaatatcgaaataatcatagcgggattggctgcctgctacgatctgcctcgggagtagggcaacctggctcggagcgtttcgcttgcctctgttcccaagttgtcatcttgaagtttctgtgccggctcctttatttgccatttcccgaggataatggtagggaaataagaagcgcattgctcatggaatcacgtgcaacggttgcagtaaaatcggggtatgcgcgaaggaagggaacgttatggaacgtgaaaatgcatggaaatcgtactccgagcaagatcttgctgcggtcgagacattggctcaggggtatatcgattttctttccacctgcaagaccgagcgcgagtgcgcccgttttgccatcgaccttgcggaggaaaacggttacgtcgatctcaagcaagtgatcgaggagaagcgcccgattcggccgggtgatagaatttgggcgcatgcgcagggaaaagcgctcatgctcgtggatgttggagccgatccgttcgagagcggtcttaatatcctgggcgctcacatcgattcgcctcgccttgacgtcaagcagaatccgctgttcgagtcgaacggattcgctctgctcgatacgcactactacggcggcattaagaattaccagtgggtcacggttccgcttgccatccacggcgtagtcgtgaagaaagacgggagcgccgtcgatgtcgtcgtcggcgaggcggcggatgatcctgtgttttgcgtgaccgatctcctgatccatttagcctcgaagcagatgggcaagaaggcgaacgaggttgttgaaggcgaggatctcgatattctcgtgggcaatcgtccgctcgttatcgaaggcgacgatggggcctctgccgtcgccgacaagaacagccttgaagcgaagcgcgccaagcttgccgaaaaggaacccgtcaaggcctatctgctcgatcttctcgccgagaaatacggcatcgaagaagaggatttcctttcggccgaactcgaagtggtccccgcgggagccgcgcgcgattgcggtttcgatcgatcgatggtgatcgggtacgggcaggacgaccgtgtgtgcgcctatacgtcgctgctcgctcagctcgccatcgaggaacctgcgaaaacgagcgtgtgcatcctcgttgataaagaggagatcggaagcgtcggggccacgggtatggcctcgcagttcttcgagaacacgatggccgagatcatggcgctcgccggatcccccggcgatatccccctgcgccgcgcccttgcttcctcgagcatgctgtcttccgatgtgagcgcagggttcgatcctgcgtacgcgagcgttttcgaggcgaagaactccgcgttcctcgggcggggacttgtgttcaacaagtacacgggcagccgagggaagagcgggtcgaacgatgccagcgccgagtacatggcgcgcatccgcgccatcatggatgaagctgacgtggcgttccagactgccgaactcggccgcgtcgatgcgggcggtggcggcacgatcgcctacattccggcgaaatacggcatggatgtcatcgattcgggcgttgcggtgctctcgatgcattctccctgggaggtatcatcgaaggccgatctgtacgaggcgtacaaggggtacaaggcgtttctgcgcggggcgtagaaacgcgtaagagggcacggcattccgaaaggcgaaacgggcgtcctgcgaggtgggcgcccgttgtgttttttgcgatcgccgatcacgcgcgcggcggctctgcgcccatgcgagcgtgcggttgcatgggtgcaaaagaccgtcggccgcagaatatttctccacattctctgtgcttggtcgcacttgcgctttgtcgtggctataatagcgggtaatacctgagtaacggcccgccgccgatcgggaaagctggttgctgtccgcgccgtgcaaacctcgaccgcagtccaagaaggagtttcgtccatggcttactatttcgacgaaccatcgcgtacgttcaacgagtacctgctggttcccggattctcttcgtcagagtgcattcctgcaaaggtgagtttgaaaactcccctcgtaaagcacaggcaaggggaagagcctgcgatctcgctcaacatcccgatggtttctgccatcatgcaatcggtttccgatgacggcatggccatcgcgcttgcgaccgagggaggcctttcgtttatcttcggatcgcagaccatcgaaaaccaggcggctatggtagcgcgggtcaaggattacaaggccggttttgtgacgagcgatgcgaacctcgctcccgacgcaacgctcgccgacgtgcttgcccttaaagaggagtacggccactcgacgatgcccgtaaccgacgacggctctgcccacggcaagctgctcggcatcgtgacaagccgcgattaccgcatatcgcgcatggatccttccgagaaggttgcggatttcatgacgccgcgcgagcgcatgatcgtggccgctgcggatacgagcctcaagacggcaaacgatatcatctgggacaacaagctcaactcgcttcccctggtcgatgaggaagaccatctcatgtacatggtgtttcgcaaagactacgattcccataagtcgaacccctacgagatgctcgattcccacaagcgctacatggtgggggcgggcatcaacacccgcgattacgccgagcgcgtgccggcgcttgtcgaggctggcgcagacgtgctgtgcatcgacagctcggagggcttctccgattggcagcgcatcacgatcgaatggattcgcgagcattacggcgattcggtcaaggtgggcgctggcaacgtggtggatgccgaaggcttccgtttcctcgccgagtgcggcgccgatttcgtgaaggtgggcatcggcggcggctcgatttgcatcactcgcgaacagaagggcatcggccgcggtcaggcaacggctctgatcgaagtttccaaagctcgcgacgagtacttcgaggagacgggcatttatgtgccggtgtgttccgacggcggcatcgtgtacgatcatcatatgaccctcgcgcttgccatgggcgccgatttcctcatgctcggtcgctacttcgcccgcttcgacgagagcccgacgaacaaggtgaacgtcaacggcagctacatgaaagagtactggggcgaaggatcggctcgcgcgcgcaattggcagcgctacgatctcggcggagacaagaaggggctctctttcgaagaaggcgtcgattcctacgtgccgtatgcaggcgccctcaaggacaacgtcgaccttacgttgtcgaaggttcgttcgaccatgtgcaactgcggtgcgctcacgatcgccgagcttcaagagaaagccaagctcacggttgtcagctccacctcgatcgtcgagggcggcgcccacgacgtggtgcttaaggagaagtcgggctacggcaccggcaccatgcgctagggcgttcgcggcgttgctgcagccttaagcctttcgcggaaaacacgaagagcgcttcgcttcacggcggggcgctctttttttgactggcgatggagccggctttctctgctaagtcaggattaccgaagagtccggattgcgcctgccgattcgggcgagctttgcccccgaacggcgccggccgggggccgcggccggcgcacggggctgcgcccgacgccggtttggcatagagatcggctcaaactgcacggttttggccagattcatacacgggggggttcgccattcttccccacgatcaaccctctgtattgcgacctgggaaaacaggctgcacgatcgttgaaatccgttgaggacgctggaccgggcagcgtaaacgcatgaatctgatggaaactgtgcaatctgatggcgctctgccgacaggctgggattggcgtcgctccccaaagcgtccgacggcttgttcgctgcagcgtttcgcttactttttagagtggtttcccgtgtgggttttcgtccgtgcgccgtggctggccgtgcgggctcttctgccctcgggcgcgaactcggcatcctcgcgggcaaggcgcttttcgcgcgcggcgttgcgagcggtatgggcgccggtttcggctttctcggctgccgtctgccgcgacatctcgtagcggatgcggaagtattcccatatcagcagcacaaataggatacacatgacgatgaggtagccgatgatggcgcccggcagccccgtgaagttgatgagcaggatggggatgaacagcgagaacccgaaggtgatgaggtagagcttcatgaccgccttctggcgacgcagcaccgtgatgacctggtagacgaattcaatggccgccgtcacgccgcccgccgcaagcatgatgaagcacagatctctgaacggcatgaaatcgatgccgtacaagaagctcatgacgggcagcccgatcgaccccatgatgagcgccatgaggagcgtgagcacaacgatggctgcaaggatcacgacgatgatgaggtcgaagcgcttcctcttggcgggatcggcccaaacgttcgccatgcgcagcagcaggggcttgtagatgaatcccgccgtcagcaggatgccgtgggcggggaagtagagcgcgttgaagtacagctggctgtcgtaggaaagcacgccctccatgacgaatttcggcatgttgtcgataaggttgtacatgaacagcgccacgaacaggggaaagcattgcttgagcaggtcgaagacgctgcccatgctccacttgcgcgatttcggcgtttcgaacagcgcaagcgggaatgtgaggaacaggaaggtcgctgcggcggcgatggccatggcgatgcttgcagccgagaggttgcgcgaaacgaacagaacgacggtgaaaacgacgaacaccaccagcgaacggaatgcttgcgaaatgcccgcaagataaagcttgtccacctgctgaaggcgcccttcgtatacatcggccaggccgtcgatcatcttgtagaggtacacgcctatgctgatgaagagcatttgatcggtatacccgcggatggcgcagtaggcaaaccccgctgcaatcatgatgatgcaggtgagaatgcggtttatctgatagtcggaaaacgagtgctcctcgccgatatccgatacctggtaggtgcgcacgccgtagttcgcgacgaacatgagcaacaggcccgtgacgaaggcgagcgagaacatgcccgcctgctccacgcccacaagctgcgttaccacgatggtgagcagcggaaagaccatgccccatgcgccgaccccgatggtgttccacacaaagtcgcgcgtggtgcgatgcgcggcgtattcctcttcctgctcggcgagcgagcggtcggatacggcgccgagcaggcggttgcaccacccgttaaccgtgcgcgtgacgaagttgggcttgcgctccttacgtttcttcccgctggttgcccgccctgaggggccgaaggccttccggttcgcctgcgcctgcgtctgcggctcgtcggttgagcgtgcggcgcctagatcgtgctgcgcgcgcgtacgttgcgcgggctcttccgcgcgctcgcgccgcatggcggcggctttgccgagctgccgtttgcgggtattcgctttttcggggttggacgggtgctgatctaccaacgagcccgccttctctcacgcattgtgcacaacatgccggtgtttgcgaccttcttcgatcatcggggttcgattacttggaaagtatagttcattgcgcgctgcctcccgacaagcacatcagcaatcaacaaaccgtccgcaacgtatggctggcgcacggcgggcgggcgtcaacggtcggatgtcgtaacggggcgatttcttctcgatgcagaaagggaacgctatactgtttttatgaaaacaaacgaaacattcgaagcgttgcccgaaaaccccgtcgtcgcacgcctgcgcggctcggggggcagcctggtcgcgccgttcgcgtgcctcgcggtcgttttggcgttcgtcggcctgttcggtgcttgcggcatcgcgttcggcgatgaggtttccgatgcccaagacgccctttcggaagcggaatcccagttgacggagctgcaggccgagcgcgacgagcttgaggcgagcatcgcatcgcttcaggatgagatcgactcggtggctgctcaggcgatggcggcgcagctcgcttcgcagcagagcctcgatcggctgaagaacagcgccgtttttcactacaaactcggaggcgttacgctctacgatatggtgctttcttcggaatcgctcgccgacatgctcgcgacggtgaactacctcgatgcgctcgaggcgtcctttgcgaaggacgcgcaggagcaacaggaccttacggctgctctggaaagcacgatcaagggactcgaccagaagaaggcggagcagaacgcgttgcgcgacgagctggctgccaaggaagccgaggcccagacgcttgtcgaggaagcgaccgcccgagtcgacgaggcgaaagagcaggagcggttggcggctttggccgctttggccgccccgagcggatcggtgttcgaaacgggcgcgatcgacggaagctggcagctcggtttcgcttctgcgtacagtttcgaggataacgacggatgggatgcaaccgcctcgggcataccgctcgattggacttcctacacggtggccgttcccatcagccagcgctatctgcttgggagttcggtggagatcagctacggcggcatgagccttgtggcaactgtcaccgacgtcgggggattcgcgggctacggccgtgcgctcgatctggcgccgggggtatggagggcgttcggcgcaagctcgccgggcgattggggcgtgcgccaggtggcgtaccggttcctgtaggcttcgccccgcaatcgccgcatgcggagatttgcccctgtctgctttgctccgttgcgaatatcactataataagcaccacttgtgattatgcatgctgcgggcgtgctcggttcggccgagcaggtagggaatccgcagccctgacgaggaagaaacgccatgaaagaatacaacccgcacgagatagaaccgcgctggcagaaggtctgggaagacgagggcctcaacgcggtgacggaagatccttcgaagccgaagaagtacatcctcgagatgttcccctatccctcgggcgatctccatatgggacatgtgcgcaactatacgatcggcgatgtgcgcgcccgctatttccgcatgcgcggattcgacgtgctgcatccgatgggctgggatgcgttcggccttccagcggaaaacgccgccatccagcacaacagccatccggcgaaatggacctacgccaacatcgacacgcagaaggaatcgtgcaagcgcatgggcttctcttacgactggagccgtaccgtcgtagcgtgcgaccccgagtattaccgctggggtcagtggatcttcctcaaaatgtgggagaagggccttgtcgagcgcaagaactcgccggtgaactggtgcccgaactgtaaaaccgtgctcgccaacgagcaggtgacggaaggcgagtgctggcgctgccacggggcggtcgagaagcgcgacctcacgcagtggtacttcaagatcaccgaatacgcccaggagctgctcgacgatctcgatcagcttggcggatggcccgatcgcgtgaagcagatgcaggcgaactggatcggccgctcggagggcgccgaggtcgatttcatcctgtgcgatgcagagggaaacgcgcccgaaaaccctacggatgacgacatcatcaccgtgttcaccactcgtgccgacacgctgttcggctgcagcttcttcgttctggctcccgaatacaaggggctttcggatctggttgcgggaagcgaatacgagaaggctgtaaccgacctggtcgccgccgccgagaaggtgagcgctgtcgagcgcgcccagggcgaccgcgagaagcacggtgctttcacgggccgttacgtagtgaaccccatcaacggcgaaaaagtgcccgtttgggtggccgattacgtggttgccgattacggcaccggcgcggtcatggccgttccgtgcggcgaccagcgcgatttcgaatttgcccgcaaatacgatctgcccatcattcctatcatccttcccgaggatgacgaactgtatcccgagatcggcggcgtcgccgagcgcgttcgcctggacgtcccgtgggaccacgcgttcgacgccgagggcatcctcgtgcagtcgggcaagtacacgggcatggtgggcggcaagcactccgagggcgaagcggcgatcgtcgccgacctcgaggcgatgggccgcgggcgtcgcaaggtggaattccgcctgcgcgattggctgatctcgcgtcagcgctactggggaaaccccatccccgccatccattgcgagaagtgcggcgtggtgccggttcccgaagatgatctgcctgtcgtgcttccgctcgaggtggatatcgccaagggcgagacgctcaaggattgcgcatcgttctacgagacgacctgccccgtatgcggtggatccgctcatcgcgagaccgatacgatggacacgttcacgtgctcgtcgtggtattttttgcgctacaccgatccgcacaacgattccgctccgttcgattcggcgaaggcgaaccgctggcttcccgtcgaccagtacatcggcggcatcgagcacgcgattctgcatctgctctactcgcgcttcttcgtgaaagtgctgcgcgatatcggtctcgtcgatttcgacgagccgttccagaacctgctcacgcagggtatggtgaaactcaacggcgagaccatgtcgaaatcgaagggcaacacggttgctcccgaggatatgatcgtcgaatacggggccgatgcggtgcgcacgtacatcctgttcatggccccgcccgataaagatctcgagtgggaagaggacggccttgccggcatataccgtttcctgaaccgcgtgtggcgtcaggtgagcgatttgatgggtgttgctggcgaggatacgctctaccagggcgaagcgagcaaggaagagggcatcgccgccgccgatctgctcaaccgggaacgccatcgcgtggtgggcaaggtgatcgacgatatcgatcgcaataacttcaatacggcgctcgccgccatcatggagctctcgaatgcgacgggcgattacctgcgcaaagtgtcgcccgaaacgcgaggcggatgcgactacctgccgaaactcgatcgcgatgtcgccgagaccatcgtggtaatgcttgcgcccatggctccgcactgggccgaggagctgtggcatacggtgctcggccacgaggattcggtgcacgggcagccgtggcccgatttcgatcccgagcaggcgaaagccgatgaggtggaacttgccgtgcagatcaacggcaaagtgaagagccgcatcgtagtggcagccgatgcttccgaggacgcgatcaaggaagctgcgctcggtgccgtatcgaacgcgatggaaggcaaaagcgccgtgaagatcatcgtgatccccggccgtctggtgaacatcgtcgcaaagtaacggcgggcttctgactcgtccgaagagggcgcgtcggcgcgccgcagaaagatcgagccgcctcccatttcttggacagcaagagatgggaggctttcttatgccaggcgatctgggattgaggtgcgatgaacccgcatcggggatacgggggtcctcattagggatacgggggttcgcattggggatacagtgggttcgcattgggatgtgacgggctcaccagaaaaatgcggcagggcggcgttgtcatagaggcaatgcctcgcgtgcggcgccgggctccccgtttcaacgctggaaggcgctttatgctcctgattcttccgatttcggcacaaaatcggacctgtggcaaaatataatacattgataaatatgaataagcagcttggttttttcgccaccaggcattttgttgataatcatttcagaaacaataaagtaatgaattgcataattgccacaggtccgattttgtgccgaattgtggtaatgtgagaacatggatgtggttgttggatacgaatcggcccttgctttctggcgaacggtcggcccttcgcttttgggcgatggcaaagctcgccggaatgcgacgctgcgcgcgcaaaaggccttggcggctgagggcaagccgcggcttgaaggtgggaaccgtcggccggcaggttgcacgcttcccgtgcatgtgctggtcggtcgggatgcgatgcgcgttcgaactaaaagcgttgcgagcagcgtatgctccagcttgccgcagcgatcggtcgtcgatgcgggcacgggcttccttatctgctctcccgagttcgttttcttgcagatggcggcttcgctgacgctggtgcagcttattcaactgggattcgagctgtgcggcacgtattcgttggctgaaaacggccccgctcgcacgcgcagggctccgcttaccgcggtcgccaaactcaaggcgttcgtcgaggcgaaccaaaacgtgccgggacgcgcgaaagcgctgcgagcgttgcgctattgcatggatggatctgcttcccccatggaaacaacgctcgtcttgttgctttgcttgccatacggtttgggcgggtacggcatcgagagacctttcctcaactaccgcatcgatgcacctctgggcatgaggaaggcgacggaccgatcgtattgcaaggccgacttatgctggccgaaagtcaagctgtgcgttgaatatgattcgaaggaataccatcttgagccagagcgccaagaaagcgattcgaggcgacggaacaccttggttgcgctggggtttacgatgatggtcgtatcgtgggggcagattgcggacagcggcgccttcaatcggttggcgcaacaaattgcgagaaagacaggcaaacgcctccgctataaagaccccgggttcacgcgcaagcaccttgctcttcgcgacgagctgctggatccgttgcgccccccttgctagctgctgagattttcatcgtctctcgatggctgcgaagttgcgggagacacggtaaggcgacccgatgcgggcgccctacgcgtcactgccgtcctcatcggctgcggcttccacgatatcgatgagctcctgctgggaatggatgcccatcttcgtgtagatgtggcgcacgtgggttttcacggtgttgtgcgaaaggaacagcttctcctggatgacggggctcgtgcgtccacgagccagcagttcgagcacctccgattcgcggttcgtgaggccgaagcgctcggcaaccgtgcggcagttgtcctcgaggctcggcaaatcatccgcaccatcgccatcagcctcgatggctgcgggcacgacgggcacgatgccctgcatggtcgattcgaagctgaatttcttcagcacgacgaagctgtagaacatgaatccgaacgtgatgaaggccgaagcccacagtattccgtccacatcgcccgccgtgatcccgctaatggcctggccgatcagcgcgccgatgccgatgccgcaccacgaggctcccatggcgaaagccacagtggcgatgccgccgagcatgttgcgagaccccgcaaccgccacaaggaagtacataagcagggtgaacgcgcttgcacctgcatgaaggaacacgcttgagaactgcaatcctcccattgcgcccgatccgatgaggacgagcggtgcggtcaaaaatcctgcgaacacaagcaacgtcgatgtttggaacagcacatcggcgttgagccgcatgcgcccgatcaccaccatgaggaatacggcggttacggggacgaacgagagcagcatctgggcaggcgtctcgatggcggcttgaaggttgagcgcatatccgtaggcggcgttgaacagcaggatagatacgaatacggggtgcgaaaacggcaggtacgacgagggattcgtcacatcgagcacgatgggggagtcgacggtgcggatggtttcgaccgtgtcgatcgcgtagccgcgcacgagggcgaacgcggcgacgatcgtgagcgcgtagagagcgagaccgagctcgaacggcaccggtgcaagggaaagcgcaaggttgacggcgtagcttgcgacgaacgccgtcggtatgcagacggtgcagcgggcgggaccgagcttcatgagggtaaggaaggtgaggaccgcgaaccacaccgtgccgattcccccgaacgggcttccgatggcaagcagcagcggggagcgcagggtgatgccgaggtagagaaacgcgatgcctgcgaacagcgcgagaaaagaaatcgccgaccatgccttttcgcgaaagacgctcggcttgcggtacgcggcaacgccgagcaggagaaagaaaacgacgccgcaatacgtcgacacctcacgcgccccatcgttgattccgatgaaatgggggaacagcaggttgttgagcaagaatccgttgacgagcagcagcgcgagggcggcggtggcccttgccgtcatcgttgcaggcgatgccttgtcgctcattgaagttcctcccaaccgatttcggtacaagtgtatacgacccgcatcggaaaatgtaggtatgaaatgccattttagacagttcaccctctcagggcgatcggcgttccggtttgccttccccggttgccgtgccgaaaagccggatttcgcgtcctcagggtgacggcagagtcggcggggcgggataaggttgcgccatgcgatgcgaacggaagctcgctcgatcgaaaagcaaactctgtgaaggagggattcatggataccatgaacgaaaagagaacaggcttgacccgtcgcggctttatcggcctcggtgcgcttgcggcggcaggttccgtcgtcggacttgcggggtgctcccccgcgggcgatggcagccctgtggccgatgcggctccaagcgatacggccggtgcgacagccgattggctcggtgcggaacctgaggctggagatatcgcaagcacggaggagaccgatttcctcatcatcggcgcgggcacggcgggcatgtgcgctgcgggcacggctgccgacctcggttcggatttcatcttgtgcgaaaagaacgacagcgtgcaggaaacgcgcgagtacctcggtgcggtcaacagcatgtacgccgaacaggctggttacaaggtggacaaggcgaagctcttgaacgagcttacgcgttacgcttcgggcaaatgcgaccaggaggtcatcaaggtctggatcgacgagagcgccgagatgatcgaatggttcgctcccatgatggaggcggctggcaagccgaccgtgttcgacatgccccccgagcaccctaccggcggtaccgactattacctgccctatctgcagcatgtctacctgactccctatacgccgcccatgcgaaacgatattctcgccgagcacatcgagcagttgggccacgagatccgctacaagcacgaactcgtgaagcttctgcatgagggaggcaaggtgaccggcgccgttttcaaaacgcccgatggcaacgtgcagatcaatgccaaggatacgctcttggcaaccggtggctaccctgccaacccctcgatgatgcgcgcgttgcagcctgccgcccttcaatgctgcaccgcttcgagctatgctcccaacaacgatggctacggccttaaggcggggctttgggcgggcggcatcaaggatgccgatccggctcccatgatcttcgaccgcggtgcggtcgagcccggagttgattgcgggtatgtgggcgaaggcgagaaggcgatgcttcccggcaccatcttccaggaaaacatcggcagccagccgttcatgaaggtgaatcgcgagggcaagcgcttcgtgaacgagtcgacgccctacgacttcatgtgctttgcggcgagctaccagcccggcggcgtgtggtgccaggtgtttgacggcaacgcctctgaagacatcctgcgcttctctacggtcggctgctcggccttcgcgaatcagatgatggccgcaggcatgcccatcgacgagttctgcgccgttgcgctcgagcagggcgtgatggcgaaggccgacacgctcgaagagcttgccgagaagatgcagcttcccaaagaagagttcttggcccaggtcgaacgttacaacgagatgttcgacaaccaggaagacaccgaattcggcaaggaagcgtaccggctttccgcgcttcgcacgcctccgttctacggatgctggttcggcggatcgcttctgaccacgctcgacggcctgcgcatcaacaaggattgccaggtgctcggcaaggatggcggcgtcatcgaaggcttttacgcagcgggcgacgtttcgggaagcttcttctcgggcaactaccccgaatacatcgtcggatgcgcatcgggccgctcctcgacccaagggcgccatgttgcgcgctaccttgcgggagacctcgcgtagccgattcccttgcggtctgcgcacggaggtgcaagaactcctgcgcgagcgctgcaatccactccccgaagaagcgccggcatcgactggcgcttcttctgcgtttcagcttctggccaagccttatgaaagacctgtcccttttcggtagggggcgggagaactttgcgatctgccgcaaaccctttggtatcatcgatctcatggctaaggataggaaacatggattgattggcaccatagcgcttgccgttgtcggggtgatcgtcgttgccgtggcggtggtgggcatcaccaatgccgtcgtcgtgaaaacgggcggcgataggatcgtctcgatcgaagaggctgcgaccgaaaacgcagagtgcatccttgttctcggcgcgtcggttcttcccgatggaacgccgtcggggattctgcaggatcgcatcgaccggggcatcgaactctacttcgccggcgctgcacccaagatcatcatgagcggcgacaacggcacggaatcctacaacgaagtcctcgctatgaagaactacgccgtttcgcaaggcgttccaagcgaagacatcttctgcgatcacgccggattctccacctacgagagcatgtatcgcgccaaacacgttttcggcgtcgatcgcatgatcgtggtaacccaaacctatcacctctatcgcgccctgtacgcggccacgggcttgggcatcgaagcggtcggcgtggaaagcgatctgcatgtctacggcgggcagccgtggttcgatctgcgcgagatacccgcccgcacgaaggatttcttccaaacgctcatagcgaacccgtccaagttcgtcggcgatcccatcagccttgcgggttcgggcgacgacgtcgaataatgcggcggatttgcgccctgcctgctatccgtagcgttcgatgaggtcgatgagatcttgcttggaatgcagcgcggtcttctcgaggatgcggcgcgtatgcgtgcgaatcgtgctttcggatacgtaaagcgcccctgcgatgacttttgccgagcggcctttggcaagataggggagcacttcggcctcgcgtcgggtcagcccgtaatcttcggcgataagctcgtaaaccgattcgggcgaattggtttcgctctcggtgctctcggttccaggcgcttgggccgatgcatttccctgctcggctccgatcacccgatccgagtatgaaccggcctgcttttgcatgtgttcgaaagccgtcccctcggcgtccttggccagcgttctggtttggcgtctgcgatagaggaggaacagcatgccgagcagatagacggcgccgaggctgattcccacgatgacgagcggcgggcgatcgggaatcatcatgacgatgtagccgatgccgatgccgagcagcctcgatatgatcgagagcgctcttacgagacccccgatgatgaagccggaagctgaaaagtcgtaggcggtcgccacgaccatataccacaggataacgtcgaacgcgccgaagcaggcactgacgacggcgttgagcagcaccgagttgccctcccagaaaaaaggcatgaccacgaacgccgctacgatgacgggcacgatgatgcggtaggccatcgagatatcgatgcgcttgcggccgagcagcgcaagcgccgtcagcgcgatggcaacgatgaagttgaggaaaagcggcatctgatgagccgcgttcaccgaccctacggaaaacacggtcatctcccacacgaacccgaacaggcacgacaggatcaatcccgcgaggataaggctccaaagcgaactcatggccgcaaggtacacgggcgatttatcgtgtttcggcgctgcgagcgtgacttcctttctgctgcgggcaaggcaggcaagcgcgatgaggggaagcggcaccataagggcgaggatgggaatcccgagctgctcgtcggcgaaggaaacaagaaggaagatcgtggttgtaagcaggaagacggcgggaatgtagaacgaggtgcgcgagggatgcatctggccgtacacctgcgcccagcttccccagaagtacccgtacccgacccccgtgaccaccgatcccgcgatcagcgtcggcatcgtcaaatgcgcatcgagccgtccggaaacgttgagcagcacaatgccgacgatgatgaatgctgcgaatacccatgcgggcatcttctcgtagcgtttgggatcgccttcgatgatcgacgatatggcgaacagcgtcgcggcgttcgcggcgaacgagacgacgatcacgagcgtttcgttttcgggcgttcccagggcatcgcaaagcagaaacgtactgcgaaacgtgagcatgctgcatgcccagaagaaggcgaggccgaggtgcctcaggcgaagggtcttccaaatcatacgcatgctgcgcttgtcttcgggtgcggttgccgctgtggccataaacccgtcatccccctgccgttagccattctatctgcgcaaacgtaaatcatcagaaactgatgacgatgcttgctgcctcccagcataccatgatcgcaccgcagggaaagggatttttcgatgaaaccgattgcagctgaatgtttggaagcgctgagcatgtgcgcagtgctgttctcgcgcgtcgagcgctgcgagtacttcgaactgagcgatgacagcgtgtgggagagccttgccaaaacggctctcgcttatttcgacgacgtcgagcatagggacgagtgcgcccgcttggccgtgccgcctgcgctccccgtgatcgaaaccacccagaacaatctgctcgtctcgggcatgccgcttgcggcgctgccggtggaatcgttgtacaagcagtggtcggcgcaaaagggcggcgatctcgcagcatcgaagggcctttacctcggcgatagcgcgcagcatatggcggcgctctacgagtcgctcgaaatcgaggttcccgacgagttcgctgcgatgcccgaccatctttcgctgttgctcgaattcatggtgctgcttctcgaacggggcaacgacgaggctgcgcgtcagcttgcggcggaccatttcgattggctcgacggctactgcgaactgcttgccgagcgcgcccgcgatgcggcgaacgtagaggcgtatgcggaagagaagcgccgcgatctcgaagagggcattctgttctatcgggcgctcgccctgttggcggcgatcgtgatcgggcaacttcattgcagcgatcgggttgagtaaccgatcgcctggaatcaagagataagggagaaagacgagatgacgaagaaggaggcaatgcatgcttgagtcgaaactatccaggaggacgtttctgaagggctcggcagcggcggcagcactggcgggagccgggacggtgtcgtttggggcatggcgggcgcagaaggcgggagctgcggaaaacgcaacgatcaccgaagcgccgacgttgtgcaacgggtgttcgagcaagtgcggtttggtggcgaccatgcaggatggtcgcttgtggacggttcgaggcagcgccgcccatccctattcgaaagggaccatctgcggacgcgggcacggccttgcccagctggcgtattccgaagagcgcatcacccagcccatgcggcgcacggagtcgggcgatttcgaaccgatcagctgggacgacgcgttttccgaaatcggccagaaggtaaaggacatcatcgcatccgacggagccgacgcgcttgcgatcatccaggatccgcgtccttccggcaagtactattcgaaacgcttcatgaacgcgctcggctcgccgaacgtgtacgcgcactcgtcttcgtgcaacttatcgaaggaaagcgcctaccagctgaccatcggagcttcgaactattcgaccgacttcggcaatgccaagatggtcgtcttcatcggccgcagttacggcgacggcatccgtccctcatcggtcatgagcatcgcctcggccgccgaatcggcgacgcgcatcgtcttggttgatccgcggttgaacaacaccgccatcttcgcagacgactgggttccgatcaatccgggaaccgatctggcgtttttgctggcaatatgcaacgtgctcatcgaagaagacctctacgatcacgatttcgtcgagcagtacacgacgggcttcgaagaatttgccgctcaggccaaggagtatacgcccgagtgggccgaagagatcaccgacgttccggctgagaagatagtcgagcttgccgaggctcttgcgaaagcggcgccggcggcctctatcgaagccggctggcgtgcggtcatcggctgctcctacttcaactccttcgacaccgcccgcgcgggcactgcggtgaacgcgctgctcggcagctggggacagaagggcggggcgctcttgacctcgtcgccgaaggcgggctctctctccgatacgcgattcgccgatcccccgaagcccgaatccaaggccatcggtgccaaagagtacccgcttgccctcgcaagcgccggtacgaacatcgctgccctcgaaggcgctctcgatggcaggatcaagggcatgttcttctacaactcgaatgccgccaaaggctatgctcagcccaagacctgggccgaaggcctcgaaaagctcgatcttgtggtcaccgtcgacgtgcagatgagcgaaacggccctgctctccgattacgtgttgcccgaatgcacctacatcgagcgcctcgagctgcccgagtggatcggcggcaagaagcacttcgtcggcatgcgcaccgccgtgctcgatcgcgtgcatcctgaaaccaagacgtgcgacgagatattcaacggcttggccgaggcgtgcggcgtgggcgagtatttccagtttacggctgaggagcttgccgcagcgcagctcgaaagcgtcggcgtttccatcgacaccatgaaaaaggaaggcgtcgtggagcttgtcgatccgaagttcgagtacaaggttcccgcattcaagacggcttcgggcaagttcgagttcaagaccgacgccgtaggcgaagcgggcctcaaccccgtcatcggatacgtgccgcgcaaggtattcccgaaagagggcgaatttgcgatcatcggtggcaagcagggcatccattcccatacgatgacgcagaacatcccggcgctgaacgccatatcgcgccagtacaacatggagcgcctgtggatgaacgcggcggatgctgccgagctcggcatcgaagacggcgacatggtcgaagtgtcctcgagcgagcacaccggtcaggtagcggtgcgcgtgacgcagcgtatgaagccgggggttgtgttccttcccacgcactacggcggaagctctccgtatcagacgcgggcatatcagtacggcatagccctgaacgatttcatcccgttcgacgccgaaccgggcgtcggttcgatgatgagccaggaggttgcggtaacggtgaggaaggtggaggcataacatggcacgttacggaatgcttatcaatacgaagaagtgcgtgggctgctacgcctgccgcatcgcctgtcagatgaagaaccatctcgagccgaccgaatcgttcatccattacgaagagcgggaaacgggggagtacccgagcgtttacaacgagataatccccgtccagtgccagcactgcgaggatgcgccctgccaggcggtctgtccgacgcacgcgacttacaccaccgaatcgggcgtcgtgctggtcgaggaagagaagtgcatcggctgcaagtactgcatggccgcgtgcccctacggcgcccgcatccagatcgaggcgaccggcgttatcgagaagtgccgtttctgctgggaagacggagagccggggaaccccccggcgtgcgtgggaacctgcatctcgggtgcacgcgtgttcggcgacctcgacgatcccgagagcgagatctgcaaagcgatcgctcgctacaacgcccagccgattgcgggcgatctgacgaaaaccaagatattctacgtgaggtgatgataatggtttggggtcctttgattgcttggtacctgtttttggcgggtgccggagccggggcgtatttgacggctgcgttcgttgaggcgaaatatccggataaccacaagatgcgtttggcgggcaggatcatcgcgccgatcttcctcggcatcgggctgcttctcttgatgctcgacgccgaagcgggcctgcacaatccgctgcggtttttcaacctcatcgcgaacccgggttcggttatgacgctcggcgtgtatgtaatctgcgttttcatgcccgttgcgctggcggttgccatccttgacctgcttaagaagcgcgtgccccgctggcttctgtggatcggcgtcgcggctgcgttcggcgtggcggcctacaccgggttcttgctcggcgtcatcaaaacgttccctttgtggaacaacgccatccttccgatactgttcgtggtgtcggcgctgtctgccggcctggcggcgacgagccttgtcggcctgattgcggatcgggagcagttcgagcacatgtggctcatcaagaaaagccatgtgatcctgtcggtgatagagctgattgtgctcatcacgatgctcatcatcgtgcatacgggatcgtctgccggcgcggcgaccgtcgattcgcttgtgagcggccaatacgcggtgccgttctgggccggactcgtgctcttcgggctggtgatcccgttttgcatcgaaggttatccggtgttcgtcaccaagaaagtcgaaacgtcgactacctcgcttgtcctttcggtggtaggcgaagcgggcgtgctcgtgggcggtttccttctccgcttgcttgtggttctcgctgctctgcccatcgcgttcgtgtgacgtatcaagtacatgcagcgaaaggcacccgctttcctttgaaggcgggtgcccgcgtttcgtgcgccgggttcgtttcccttgcgggcgaaagcgggcaagcgcgattggaggaggcccttttcctgccgataagctcgggcgtgcggtacgcgggcttacgaatgcgcgtaggcgcccgcgtgcttgagcatggggatggttgcatggtcgttccagaacgtgatgagcgggccggtaaagaacgccgaaatcaccgtgaacaccccgatgggcccgccgacgaaaaacgcgatggcagcgacgagaatatcctgggccatgcgcgcaggcgtgtagggggcgggggttctatcggcgatgataagcgcaacggcgtcgtagggagccacgcccgtatcggtgttcatataagttgatacgccgaatgtgaacagcccgacgccgatgacaaggcagacgcccgcttggaatatgctgccgtcgaggggcagcatcgaggtgagaagccatgtgaagaaatcgatgaggaacccaacggcgaccatgtttatgatggtgccgatgccgatctgcttgcggccgaatatgaacacgagcacgagaagcgcgatgttgacgaccagctggtagatgccgagcgacaatccgagaaggccgctgatgccgatgttcatagcggtgaaggggtcgacgccgacgccgccgatgcggcagatcgtggtgccgagcgagatgatcacgattccgatggtggagaacgccacgcgtttcgcaagcgctttggttttttcagaatttctgggatccatgatgcaaccctttcctgccgagggcggttcgttgacttccagtatcagcgaatcggctggcgacggcgggaaccgttgtgatgcggatgggttgcggttgcccgagcgttatgttgttgccgggcggttatcgtcggcggggttttctacagcggctggcaggcgggacagccgattgccgcaaagcatcggatcgagaagggggaatgcccgctttgccctcgaacgtcggcgcaaatcggcaaaacctccttttcgatagagcgctttccgcccatcgaataaaaaggacctgcattgctagcgggatgcaggtcctttgtaacgaaaaaggcagaaacggctggacggggttagtgacacgttccgcatgcatagacgttcttgtggtggcatgagatgcaagaatcctcagacttctgcgctatgtcggattcttcgtgcaccgtatggcaatctatgcaattcagcttttcgtctacgtgcgcggccgggagctcgtgcggattgacggttgtcccctcttcgtcggtcagcacggtaaggccgcttgttttttccgccagcttctgccagctcccgtggcaggataaacacgtgtcgctctctatgtcggtgtctttaagctttttaggcattttggagtccgcagtagctccttcgtgggccgtagctagcgaggtgctgtcgttatggcatgtcaggcagtcgtttgttgcatggacggctgccatcgcgccgcctgatgccatgtccgcccgatcgctgtggcatagcccgcaatcctcttctcccgtccacccgacctgcgtttcgccgccgctcgcatcatttgattgatcgctatggggttgcccggcgcatccataggagaatgcgccgaatgccaggacgagcgcaagagcaatggcggcagccgagagtctttcagtacgtgcagttatcactatcgtctcctttgggttttgggaatagcgaggttaagcttttgcgtatccgcccgcagattcaccggcgatcgctccgaaagtggcgcacagggccaagcctccgccgtattccttgtagaagatcccgcctgcggccatcggcgcagcatagaggcccgaaattgcgcggtcgtccgtgtcgagaacttcgccgtgttcgttgatttcgataccgccgtagaacccgctgattccggcagccgcttgaacggcatggaaggggggcgtgtcgagcttcgtgagatagccggtgggcatggtcgttttcttgatgggaaggcgatcggctgcattgtctgctgcggcagcctggtattcggcgatggtttctttgaagttgtagggattcaccttgtaggctgcgatttggtcggcgagctcgtcaaccgtatctgccgacagcacgactccgcctgcgtttgctatgaggtcgagctcgctttggtggtcttgagccgagtcgatgatgacgaagacatggccgtctgcctcttgcgtcgaatcgttggcgaggtagttgtcgccgacgtagttctcgggaccttcgtcggtgaaccgcaatccgttcatgttgaccgcgatgccctcggtggcaaacttctgtactgcccccatgatcccgcttgcttccccgaaatccacttcgtcgtattctgcctcggtggttggggtcaaggcgggccatggattcaggtgtccgtagaaatggccagtgcccttgctgagcctaccgccgtagcgcaacgccaaattgatgcctactcccttgttgtacaatgacgctcggcagatgctgcaatcggcccagcgacccaagtgcgtttcgatcatgcccttgttcgcctggtagctacccgtggcgataatcgtcgcctttgctccgattcgcgtgacctttccgtcttttcccctgacgaccgctccgacgataccgttgccgtcgctgatgagatcgatgagatacgtgtcggttatgacatttgcaccctcgaccatgtattccaggaattcttgtttcgcgctctctccgcccgagggattgaagccgatgaggtgggcgccgtagagggggtagtccaaatcgaggggcatgacgggtgcccccgactcgttgagaacccaatcgcatagatcgacccatcgttccatgaatagcgtgcgcatggcggggtcggcgcttgcaagcatttggtcgacgttttcaggggtgatatcccatgtgtggaagaagcccccgcttagcagcgccgtccccccaacgatgggcgaggcctcgacaacggttacttcggcgccctgctgcattgcgaagtttgctgcgaagcaaccgcccgctcccgctcctaatacgagaacgtctgtttcttggtcgaaggctgcagatgacatggtggcttcggcgttgccggccggggtggttgcgcagcccgcaagcaacattccggcggttgccaagcttcctccagccgccattttcagaaagcttctgcgagaggcgcctctcttgttttcggatgcggaattgctcatcttcattctccttgtctgtgtctgtgctccaagctgtttctatcgggaaatccccttctatagaattgcaggggttgagggtcggatcatcatgcgaagttggatgatcaggggctttgggtgacgaaaacaggatgaaaacctgcatgaaatccaggatgagagaatactttgctctttcaaagaggggagcggacggtataatctcgtgcgtatcgagcgctgcaaagctcggggctcggcgtcgtggggagcgttggctctcagtacgggggggattcatgggacgattgcgcaatgcgattcgcgaagattcggcaggtattggcgaatggtaaccgattctgcggcaaaaaaaccctgcactcatgcgctgttggttgccgtggatgggtttctgccttctatagttgcaataggcctcatacgagcatggctttctctgcaaaatggcctgggtactctgtttgaaacgagcctgagttcggacgatgcctttctgcggagtatgctgtttacggtatttctcgggttgttcggattgctgaggctgaacgatggcttcgttcggcatcggcaggctgtggttttggcggttggggttgcttcgtccatcgtttacgccgtcggactgacgctcgcgggcgcgcatgtcgtggcgctggctgcgaccgtgcttctctgtgcaagctatgcatttatgacaagggtgtggggcgaggacaattgctcgtctgacttcaaaacgatcgtcatcagattgtccttgtcgtttctcgtgcagtatgcggcatattcctgtgttttggtggtgccgcaaggagcccaaagcgttttgacggctgccgttcccgtcgcgattgctttattcttgcgaaaggcggcggtgcaagtaggaaatccaggcgccgcttcgaatgcaaccctgtcgcgatacaaaatcgtgttgcttgtcggtgttgttttcttctcgtgcttgggccatggttttctcttccttctctcgtcaaagctttcgggaacgtggaccctgggcccgctgatcgttgccgttgcctcgcttctgatcgtgaggtgggttgggtcgcctgctctgtttcggatgatggtatgcctcacactgctctcgcagtgtcttttcgccgctcccgtactgctatcgtctttcgatgctgattgggtatcggttctgaaatcttttagctacgctggaacgatgatgctgacgatggcaatcggttgctgggtcgggtctctcggaaagacgggaggacgctctgtttgccgttgggagttcttgtacttcgctgcattttaccttgccttttatgtcgcacaggaaatcatgggctttttcgggggagataaagtcgctatgctggtcatcgcttttctgtgtctgctttttgcggcgatccctatggtgagtaccgactggtctatgtcggctccggaagaacccgttcgcaacagcagggttagcgaagaagacaaggtcgccttctatcgaaagttggctcgcgataaagggctgaccccgaaggagagggaggtgctcgcctttctttgcgatggatacagcagcgcagatgtagcaaaagagtttcaagtgtcgaagaacacggtaaggacgcaggttcaggcgatctatcaaaaactcgacgttcactcgagagatgagcttcaggcatatatcgaccttgcgatgagagaccgcttctagcggcaacctttgccggcggggttttctacagcggctggcaggcgggacagaagtacacgttgccgccgagatacgctttgcgggtaatgggtccgccgcagcgcgggcagggatcattctttgtctttgtcgaaagaacggtcttgtagccgcctgggtttccgaagagatccttgtcggtgtcgcgcccgccgcgttcggtcatttcggccagcgtgtttttgatgcttgcgaacagggcatcgaaatcgcttcgatccatgtcgcgaagcttcctttgcggatggattcccgcattgaagaggatatcctgcaacacgccgttgccgagtcccgggatacgctgctgagtggcgagcagggctttagccgacagtttgtcttcggtgctctcgacgatgccgtcgaagtagcgcctgtcgaacgcatcggttagaggcgagggcttttcgaatacgacgttgtagtaggaattgtcggtgatgccttgcgggtacaccatcatggctccgtacatctgaaccgagcaggtgaagccgcttccgtcgtcgaacatcatacggaactggtacttcttcggcggtttcgcatcggcctcgaaatggcggatgttcacgccctcgcttaaggcgaggtgcatgtcttcgatggttgcatcaactatgccgcccactcctacgcaggcgtcgagcgtcttgcccacgaggagactcgggtactcttcggcatcatggctgtagaatgcgaatccgtgggcggtgtgcgccgcctcgaccagtgagacggttcggccggcgaacatgtcggtcatctgtcgggcaacggttgcgctctcgggcagttccagcatggcggctcctcttcgcgggatgattcgttcattatacagaagaggatgtcgtgaataagggaatgtcttggattttcttgacagtcggggattttcggcattcagtcgagatcgctcggttcgaacgactcgataaggtcgagcagctcctgtttcttgtggatggcgagcttcgtgtagatgcgcttgctgtgcgtgcggatggtattttcggataccacgagttcctcggcgatgcgtgcaacgctgttgcctcgggcgatgaattccatgacttccgtttcgcgtgccgaaagccggtagtggcgctggagcgcggcagcctgcttggatatacggtcgcggtaggcgggctcttcctgctgggcgcgcccgcggacgcttttcttcgaatctgcagaagcgccgccgtccggcaaagcttccgtgcctccgcgtgtccgccgatgcgtctgcggccgttctttgccagaggcggccttaccgagacggggcatgagtgcgacgagctcgatgctttcggcgccactgcggtgtggagagaggatctggcgaaagcctccctgcccgatgaagtacatgagcccgagcaggtacagcgccactacggcgacggccgcgagcggcgggatgttcatcatggcgaactgctctgcgaaggttcctgaaacgaatccgacatcgtggaggaggtagacgatgccgccgaagaacccgtagatgaaaacgggattgatgccgcgatcgcgcgatgcctgggcgcattggatcatcatgagcatgatggcgcagctgtacactgcgtagagagcgctggcgagcgggcccgaaagcccttctccgaaaacggggagcagcacaaacgccgatatgagaaacgggaagaatatgcggtaggcggccgttacgttgaggcgcacgttcttgacttgccacaccaacagcaaggcgactgccgcaacgagcgaggagcccatggaaaggatgttgacgaggggtccgatctggggatcgccgatggcgagcgaccgcatgatgccgcagcagaagccgagcgcaccgatggcgagcgcgctgcgccaatagtcgtgcaggatttggcggtagatgcgcgggtgagcgcgggggatgtcttcaaacatcggttggttggggtcgatggttcggcttttcaagacaatgcacagtccgaagaggggaaggaagacgagcgggatcaggtagacggtgactgcgccgggaatcaggtaaagcgagaaatagaacagcgaagcgtatgcagtgccgagtatgaggtcgcggttgcccgtttcggcttcctggctggcgaacagccgctgccacagcatgtagaatccggcagaccccagtccgagcagcgctccgccgatcacgacgagcgtcaaagcgatctcatcgatgtagatggcgccgatgaggcagcaccagccgaggaagtagggtacgcttgccgcaaccacgaggaatcggcgggttggaccggggaagaagtacacgccgagcgcgctggcgaagtagctgagcgaaacgacgagcgactgggcgaggaagaagccgaacacgatttcctgcgtttgaaattccatgggcagaaacgggaacacgccgccccatacccccgctgcgttgatggcgagaaacagggcgtaacccagcgatgacacgttgggtttgagaatatgaagcagatgtgcggttcccatgcatctccccttgtttcccgtctccttataggaaagtatagcgatacgtagtggtgcgcagaacgacgatgcgcaaaatggaaatcatctgagtatcgcctgaacagggatttctcaaaattcgcacgttttatgtgacaaggggagttggccgctttctagaatggcgacatctttcggcaggaaaacggacaatgcggaaacggcaaagtcctttttcggcaggaaggtcgatgcttgcacgggaggcaagctatggggcaagacgaggaagatagaggaaagggagagaacatgcttggttcacaaaactccgcgctgtcacgccgcacctttgtaaagggctcggcgttggccagcctcggcgccgcagcgttcgggagcggtatgctgttcgggtgctcgcctgaaagcgaggctccgaaagaagaggctgcagacgacgtactcaagacgggcgcgaccacggttggcgccgaggaaacgatcacttggggccactgcgccatcaactgcccagggcgttgcagtttgaagtttcacgtacaagacgacgaggtcgtgtgggtggatacctacacgagttccgatgccggtttcgacgatccgcaaccgcgtgcatgtttgcgtggccgcagttaccgtcgctggatgaacagtcccgatcgcatcaactaccctatgaagcgtgtcggcaaacgaggcgaaggaaaatacgagcagatcagctgggacgaggctatcgagacggcgacaaccaagctgcaggaagtcatcgataaatacggtaacgaagccgtgtatgtgccttacgctaccggagtgtctgcgacgacgtcgcgaccgtttaaccgcctgctgaatctgatgggcggctacttgaacttctacaacagctattcaacggcgcaaatcagctgcattaccccgtacatgtacggttccaagggcaatggtggaagctcgtttagcgctgccgaggatgccaagctggtgctcattttcggctctagtcccaccgagacacgacagggcggtctgactacgcattacgattgggtgcatctgcgtgagcgtacgggagcgaagatctacatgatcgactaccgtatgaacgactcggttatgggccattccgaacaatggctacccatcaatccgggtaccgatgctgcgcttgttgccggcattgcacatgagctgatcgcgaacaaccaggttgatttggactttctgcacacctattgcgtaggctacgacgaagagaccatgcccgaagcctatcagggtaaaaacatgtcctaccgtgcctacatcatgggcgagggctacgatatggtagagaagacgcccgagtgggctgctgtcatcactggaatctcggcggatcgcatccgcagtctggctgaggagatcgccaccacgtctccgctctacgtgaatcaaggctggggtccgcagcgccgcagcaacggcgagtggaccgcctggtctatcatggcgctgccgtgtttggtcggccagattggtctgcccggaacgagcaacggcacacgcgaggcgcgcaacagcccctcgctcgcttcgatgtccgcaggcgagaatccgataaagacgtcgattccgtgtttcctgtttaccgatgccatcgaccacggcactgagatgacgtcgaaaaacgcaggagtgaagggcgccgacgcgctgtctgtgaacatcaagtacatgatcaactacgctggcaactgcctgaccaatcagcactccgacattaacaaagctcatgagattttggccgatgatagcaagtgcgagtttatcttgggaatcgacacggtcatgtgcgattctatgaactattccgacatcgtgcttcccgacctgttccgtttcgagcagacttcgcagattgcgactgggtccgattggggctatgtcattacgggtacggcgtgcacgacgccgaaattcgagcgcaaaaccgcctacgaaatggcttccctcatggccgagaagcttggtgtgcaagatgaattcaccgagggtaagacagaggaagaccgcatcaaggagcagtacgaggaatcgcgagagaaagacgacgagcttcccacgtgggatgagatggtcgagcggggcgtttacacgcgcgcttacgatccggtcgtatccatgaagaagttccgcgacgatccggcgggcaatgcgctcgatacgccatccggcaagatagagatcttctcggagaaactgctgcagtttacagagggttgggagctggccgagggcgatacgcttcccggcatggaaaccctgcctccgatcccggcctatatccccgaatggtacggcgtcgagaccactaccgacgagtttccgctcgtgttggcaggcttccattatcgtgggcgaattcactcctcatggggctttctccccgagcttaaggaggtcaatccgcaggaggcgtggattaacccggtcgatgccgagggacgcggtatcaagcagggcgatacgattcatgtgaaaaacgagttcggcgagattgagcttttggcgaaggtcactcctcgcgttgtccccggtacggtggcggtttcgcagggtgcatggtatgacggcgacggcctgggcagcgttgacaagggcggtagcatcaacacgctgaccacccagcggccatcccctttgtcaaagggcaacccgcagcatactaacatctgcgaagtaaccaaggcgtaagcggcgagtttcggaaaggattatccattatgtctcaatatgcattctattttgacggcactcgctgcactggttgcaaaacctgcgagatgtcgtgcaaggatttcaacgatttgagtacaggcattacatttcgcaaggtgctcgaggcaaccttgggagaaacggtgcgcgacgagagcggtgttattacgacaacgtgcataagctatcctgtgtcgctttcatgcaatcattgcgatagcccgatctgcatggcgaaatgcccgcagggtgcgatttcgaaagatcctgatacgggctttgtgtccaacgacctcgagaagtgcatcgggtgcggaacctgtgctctcgtgtgtccctatggtgctccgaaaatcgacgaggaagcaaagaaggcggttaggtgccacggttgcgccgatcgcgtcgccgaagggacgaagccggtgtgcgtggaggcctgccctgcccgtgcacttgatttcggcctggtcgaggagatggagaaactcggcgagcgcgcaaacatcgcaccccttcccgatgtgtcggagaccacgccgaatctcttcatcaaaggatctgccgacgcacaacccgtaggaagcgccgaggtggcgaatccgcttgaggttgcgtaagcgaaaatgctgaaacgagacgcgtggcagggacatgctttgccgaaggtttgcgtaatctgccgtgcgtttctcggtatggatgcggggtgcgctagaataagcgcgccccgttttttaccaacgggcgctttcggcaatggcgagaggaggattgcccatgtcacagcaggcgttcttctttgacgcaacgcgttgcaccgggtgcaagacctgcgggttcgcctgcaaagatgcgtacgacctcgatgcgaaaacggcgtatcgcagggtgtacgagtatgcgggcggcgagacgacccttgctggcgatgggtttttcacaacgtgcttcggctatttcgtatctgtctcctgttgtcattgcggagatcccgcatgcgtgcaggtatgtccgaccgaagccatgcacaaagagactgactcgggtttggtgctcgtcgacgctcgaagatgcatcggttgcggatattgccatctgtcctgtccgtacaatgcgccgaaggtcgatcgcgcaaaaggccattccgttaaatgtcatgggtgcttcgatcgcgttatcgcaggtaaaaaaccagtgtgcgtggaatcgtgccccgcccgcgcgctcgatttcggtccagttgaggagatgctggcgatgggtgagcgtgccgatttggcgcccttgcccgatccgtcggaaacgatcccgtttttctatgtgaagccctgcgtcgatgcgcggccgtcagggtcgaaggaagggcgtatcgccaatccgttggaagtgcgatagcttgttacctgtttctgagatttgaagagtatccgagagggcgtttgacattcatgcgagagcccaaggtgagctcttttgaagattttgttacattggcacgttaaacagagtaaaatcataagtgatctatgcgtacgaaacgggacgagagcacagaagcggagtgaggcacatgtttgaggttggaagcacgattctttacggtagcgacggcgtttgtacgattcaggatatcacccacaaagaagtcggcggcatttcgggggagtactacgtgctcgaaccggtatatcagaagaagtcgaccgtgttcgttcctcttgacaatgcgcggctgatcggcaggatgcgatgcatcctttcggccgaggagctgctcgatctcatcagcgcggctccggaagaacccctcatgtggatcgatgacgaatcggagcgcaagctaacgtacaaggagatcatctcgcgcggagattgcacggagcttatgaggctcgtaaggaccttgtaccttcacaaggaaaagcagctcgagcgggggaagaagctccatgcgagcgacgatcggtttttgaagacggccgagaagatgatcaacgatgaattcgctatggtgcttcatatcgagcccgatcaggttcccgcctacatctccaagcgcgccaaatcggccgagtcggcacgtccgtcgcgttccgctcgcaggggattcctcaacaggtaaaacgaaaaatcgcatgaattatgtgatagcgtctcggcccggttcgctatgctttgagccgtggtggagcacggtacgcgtgcgctacaatggatgcacgcgcgagcgtgttcgaggaggagaccgatgcacgagaaactcaagcaagacgatttccgcggccgggtcgctttcgtgggcgaaaccctgggaccgctttttctgcaggatccggtcaaaggcgatgcccaaacggtatttgcggcgatagccgatctcgatccgcttcaggcgggttgcgagtggccgttcgtcgacgatgcctctgcgcagcgccttcttggccttatggtcgaagggctcggcaaggggatcgacgacgatgctctggtgtgggaataccgtcgcctgttcgtaggtccggccaaaaagcccgcaccgccttggggatctgtctacaccgatcgcgaatgcgtggtgttcggggaaagcacgctggcgcttcgccgatggatgcgcgaaaacggaatcgagcgcacaaccgatgaaaagacccccgaagatcatatcggcctcatgctcgtactgttggcctggcttgctgcaaacaagccggagctgatcgagccgtacttgcaggatcacgtgcttacctggtcatcgcactttctcgatcagctggcagaagcagccgagcatccgttttacgagggcttggcccttttagcgaaggagagcctcgagggtttgcagcgcgaactcgatctcgaggtcgcgtatccgaggtactaccgctagatgatgtcttccggttttgaaacggctctgggggagatcacgctcgttttgttcacgacgctcgcgccctcgggggcgtttgcgttcatgatcatggcgggcgttctggcgtgcggaaaacttgatggcgcccttcgccgccgcatcgataagttcctctgcatcccgctttcggtttcgatggtgggcctcatcgcttcggcgacccacctgggcaatccggccaacgcgctctacgtgttcatgggcgtcggtcgatccccgctctcgacggaagtgttctgtgcggtcatattcctgtttttgacgggagtgtattggctgtattcctttgcccgcaagccgaaggttgctttgcagcgcgtatgggctgtcggcatcgtgattgctgctgcggcgttcatcacggcggtggcgcttgcctacgatgcggagaccatcgtatcgtggagcaccccgttcgtcccgatcggcgtgtggctcaatgcgatcgtgggaggccctttggtcgcgctgctggcttttcgtgcggctcgggccgaagacatcgtagggcgttgcggttcgatgctgtgcggattgtcgtttgcggcggttaccgcaaataccgttgtctatgcgctgcaggggttcggactgcccggcatcgagaattcgtttgggtccgctgcggaactcgtgcctgcgttcgggttcgttgtggcggcttttttcgcttgctgtgcggccgcgacggcgctgatgtattcgagcgtgcgtgctggtaaagattcgggcagcggccgctcgctcgcttcgtgcgcgctcgcctttgccggcatattccttatgcgattcgtcttctacatgatgcatatgacggtcggcctaggcgtctgaccgatcgtcgcgatggatcgcgaaacgggctttcccgcgggccttggcttcgtaaagggcgctgtcggcgcgacgatacagctcggtcatctcggtgccgtctgcgggaaccgcggcgattcccgcggttgcgctcagttcgagcatgtccccatcgggaagttcgataggccagcgctctgcgcatatcttctccaccttgcgctggaccgcttccttttcgactcccgaacagtacacgacgaactcgtctccgccccagcggcaaacgatgtcgcttgccctgaagggacggctgagatgccgggcgctttcggaaagagccttatcgccagcgaggtgcccgtaacggtcgtttacctgtttgaaatcatcgaggtcgaagatgatgaatgcgcccgaaacgccctgatccttcgcctgggcaagcgctttgcgaatgctccgcgtgccggccgaacggttgcagagtcccgttagggcatcgcgatccgccttccttttgaggtcgatctcgcggcgcttcgcatcgtcgatgtcctcgaggtagccgatggcgtggacgggccggccgtcgccgtcgaacaggatttcgcttgaaatcttcacccaatgcagcgaatcgcttccgaagttcgcgatgatttcgcattccgaattggtgccgccgtcaatgtgcgcgaacgtctgggcaacctttttcctgctctcttcgggaagcacgtcgagtgcaaggatttcatcaagctgggcttccgccgatccgctgttggaaatcggtatgccggggggcagcaggcgtatcgcaaggctttcctcggaaaggtttttgaacgagatcgagtgcgtttcgacatcgtagagccaaacgttgagatcggcttgttcgataacgcttttcagcagccggtcttcgagttcgagttccgactgcatgcgcacagtttccgatatgtcgacgcagacgctggttattgcgagtctgccgcttttcgttttgactacgcgaccgcgcgccgccacccagatgacgccatcgtctttgcggatcatgcggaactgcgtgctgtattccatgccctcgtagaagaaagcatcgatattcgatccgaatcgccggtaatcgtcggggtggatcaagcttgccgcgttgcccccggttgcctgtacaagttcggcgtacgaatcgcacccgagcatacgggccatctcgctgttggcgaaaaagagcggaaagccctcttcgcagtagcctccgacgaggccgctgggcgtgctctgggcgaaaacctgggcggcgatccgttggttttcgtccgtgatgtccccgatcccctggtctgaggagtgcatcccgatgacctcgctcagcatttcttgcgacatgcgcagcgcatcctcttgctttttgtcgtgggtgatatcgagcagggtcgcatagaacagctttctgttctcctcgtttcgaagatggaacgccttgaggcgaatccagacgatctcgcccgattcggagtagcggcgaaacgtgccgagagatcccgatacggtgtgtttttccgcgcgttcgaacaggtcgagtacgtgcgctctgtcgtcggggtgcacgtactcgagaaccgccttgcgccgggctgccatttcgcttggatcgctttgggtggtgcggtagtactgcttgttgacttgcagcagttcgaaccgatcgtccgaaagggcgtacaccgccatggcgccgacgatgttgtcgatgatcgttcggctggcgagatcgtttttgaaaatgtcgtggatctcgatgatttcgaccggttcgtagttgatgccccggtaatcgaccatgccttcctgctcgatgagctgttcgagctcgtcggcaggcatcggcttgtggaagaagtatccctgcgcgtaggcgcagccgatgtctctgaggaattcgacttgctccttcgtttcggctccctcggcgacaaccgacagctccatgaggtgggtcatgctcacgatcgattcgaggatgctttcgctgcggttgaggctgtcgccgatcgcatcgaggaacttcatgtcgattttcaccacgtcggctctgatttcccgcaatatgttgagggaggagtatccgctgccgaaatcgtcgatgaacaccgagaatccgagttctttgaactggcttacggcctcgatcatcttctcgtcttccgcgtatgcgctttcggttatttcaagatggagaatcgatcggtcgagaccgtacctatcgacgaggtcggtgatttcccggacgatatcgatggagtacagatcgccccgtgaaatgttgacgcaggcggggataggggtttttccacgatcgatccagtttttgatcagccggcaggcttcctcccatacgtaaagatcgaggcttgcgataaatccgtttctttcgagaatggggatgaaatcggctggatgcacgaggccgcgttggggatggttccatcggacgagcgcttcgaccccgacgatctttcccgttcgcgtgttgcattgcggctgccagtgcaggatgaactcgtggttttcgagcgcccgctgaacttcgatgagggtcttggggtcttcttcgagacgatgggtcataccctcgtcgtaccatgccgttcgcttcgcgtaattgcccttgatcgccaaggcggcggtcatggcgtggtcgcagacggtgcgaacggggatctcgcttccctgcatgagacaggctccgatcgccggctggaatcctatgccgcggtctgctaacgaggtgagtgccttaagctcgctttccaggctttcgatctcaacggtttcggacggaagcaatgccacgaaatcatcgcccccaagataccctgcaagccccttatgggccacggcgagggttctgaggcaggttccgatcgcctcgagcagccgatctcccgtcgatcgaccgaaccattcgttgaaaaccttgaagttttcgatatcgacatagaagaacgcatacgaacactggggatttgccgctacgagttcagtggcttttctcatgaacacacccgaattgtacagacccgtgacggcgtcgattccttcgatgtgctgtcgaagggcatcgctttccatcgtgaggctttcgtcccaatcgttcggcgcttcggcgatgaagcacatgagcaccggctcgttgccggcgccgcgcttgaccgagacgatcgtctgcgccgcccactgccatccgcctcctacaagttttttgcggaaccgttcctgcagcgttccgcccgctcgggaaacccgatcgaccactgtatcgaattcccagaactcgataaaccgattgcggtcgtcgggatggatcatgttctcgacgacgtcctcgaacatcgcatcgagcgcgcctgcgggaggaggcatgacgaactttccctcttcgctgtagagaacctggtagctgttcttttcgatgttgatttcgaacagttcatcgtaggtggcctcttgggagagggcgaaaaacaggctcttgctggtttcatcgatctcttgcgaggagaacagaacgcaggggccatggccgggccattctgtttccaagctgagaatgtcgaaccatcgttcgagccgctggctgtatatgacttcctgattgaggggttcgtctgattcggggtgccaggggcaatcggggcagggagaatccctgttgcggaaagcttcgtagcagatatctccaacgcgcccgcgagggaagagcttctgagccgcgtcgttcatgaaaacgacgcggtacgaatggtcgatgacgtacgaatgccggtcagtatgtttcgatgcagtcacagtcagatcgtttcgctccctgggcagaggtcccctgtatgcgttcgctggccttgctgaaaagcataccatgacttatacgataatagttgaaaaccaggttggttggactgcagattgattgagaatacccagttgaacggcattggatgaccgttttgcagcgcttctcgtcaatcgtctttgcgaagcgccgcctctatcttgtcttcgacggcatcgatctcggctacgagagcgtttctttccgcgcgcagcggcagatactcgctgacgatgatgccggcgaagatgagtccgaacccgatgaagagcggaccggtgagcatttcgccgagaaagaggacggagaacacgactccgaacaccgattcggtggcgaggaaaagcgaagcgggggcggggtccacatgggcgactgcgatgttttgcagtaagagcgcgatgcatgaagcgaagacgatcaggtatccgaggcttacgtatgtttcaagtccgagctcggcgaatacgggcatcggctcgaagacgagagcggctgcgaagccgagcaaccctgcaacgatgaattggattatcgtgagaaccatcatgtcgcgtccgcctgcgtacttcgatgtgcaaaccacgtggaagctcaagaacacggccgatagaagggttatcgcatcgccgaagcgcagcgagaagtcggttgatcctgcaaatgaaacgcatcccacgccagccacgcagaccagtgcagcggcgatgttgaacttcgtcgggcgcggacctgagagcgcccacatgagaaacggtatgatcacgcagtacagcgaagtgagaaacgcgctgttcgaagcggttgtatcggtgagtcccgtcgagttgctccagtaggaaaggaagatgaacacgccgagcacggcgccctttttcagatggtcgaggtcgagcgccttcttgagtcggggaaagagcacgatggcgaggatcaagcctgcaaaggtgaaccggacgccgacaagccatgcaggcggaaaggaatcgaccgttgccttgatgacgacggttcccatgccccagatggcagcagcgatgagaagatagcccttgtagagccagaggggctttgcgctgcgctgatctgttgctgattccgacatagctcagcatcatagcacggagcaagcgcgtttgcggccatgctctcgaaagccgggcattggcatggcggtctgctggtgggaggcggcgcgtttcgaggcgagcgagccttcgggaagccgtctcgatcatcttgccttgcgattatcggtgtgcgagaatacgacttgttttgagaatcgggggagatatgatagcaccagtccagggaagtgtcggccagaccattacgctcgaaggatatgctgatgatttcggcagccacatcgtcgcaatcgagttttcgctcgatgggggcgcgtcgtgggcgagccattccaccgaggaaagcaatcctgatctcatggtgcattggactttctcctggaagcccgaagagccgggagtctaccagcttaaagtgcgctccgttacggaagacggtcgcaaaagccccgaggcggcggttaccgaactccatatatcagaatgagggatggctcaaaagcgtcctcgcacggaatcggccgacctgtttgttgtcctcgggttacaggcgtaattgctcccgcattgcgacagctgtctagcggacgtttgaaccaatgaaaaagccagaagcatgcagcttctggcttgcaattccatggtgggcgatgagggatttgaacccccggccttgagtgtgtaaaactcctgcgctcccgctgcgccaatcgcccctgttacgtgcgaatagccattctcgcacaacaatcgattttccgcaaacgcaactttgccgacacccaaagcggtcggggcatcgacctccttattcgccgaggggatttcgaaattcaaaaaacattcttcgtgcgcggccttgtccctcttggccgtttttcgttttccgctgcgcgacagggatggtggctttttgctaacgggactccgagcttgcgcatgtctgttttgcgctcaaaacgcgtaaggctttcatgcgatgcgcgttggatcgtgcggcgaatcgtatgcagttgcggagcaatccgtgcagaaaaggtgaaaggtcgcaaagagcgtgtgcggataatccgttggatcgcgatgcaaaacctcggactgcggtgaaaggtctctctgcaatgctggtgtgcgttgaaatcatcgcggatcaaggagcgcaaatgaggaagcctgcaacggtcgccatcggcatcatatgcggcatcgtgtgcgctggggcggtgttcgctttcatgcaggacgtcaagggggaggctgcggccgcacgcgccgaaacccttgcccgctacggtggcgagcagattgaagtctgcgtggcaacgcgcgatatagccgcaggcgagaagctcgactcttcgaatgccacggaaaagctctggcttgcggatttgcttcctcccgatgcggtgcgctcggtgcgggacgtatcaggcgagcggctcggcactcccatctacgagggggaggtcgttacggcgaagcgctttgcgcgggaaggtcgcgcgatcgacgtccccgatggcctgagcgtgctgagcgttccggtgaaggacgtgcaggcgataggcggtgcaatctcggcggggcagcgggtcgacgtgtatgcgacgggagcggctgaaaccgaattgcttgcctctggcgtgcttgtcgtctcatcgagcaacgaaggggaaagcagatcggggggcggctcgatttcgtgggttgccctcgcagtcgagccccaggcgatccaagagctcgttgccgcttcgcagaagaccgagctgtatctggtgttgccggggggcgaaaggaaaggagcggaagatgaagcctgaaatcgtgctgtgcgtcgattccgaaagcgcgaagaaccctgagctgatcggactcgggggagaaaaccttctttcccagccgtggttgcggttgttttgcagtgcggtcgaggcgcgcgcctacctccgcgaagccgatgccgtcaaggaggcatgggttgcttcaagcgacgagatggatccgataaaccttgcggctgcgctcaaaaaggacgcaggtgcaacgagcgtttgcctggtgacgttcggtggtggcggttctttgaaaagccgagccagtgcggcgggcatcgatgcgacgttgacaggggccgatttcgcctctcgatacagctcggcgaagagccggcagccaggtgcgcctcggctatcccgggcgggcgccgatcgaaagcccgaggcggcgacggtgtgcgagtctgttggcagaagcctcgatcttcccacggttgcgtatcccgctggaagcggcgacgaaacggtctgccccatccagggcaatccgggggcgaaccggccgccctctgcgtcggaatccgtcgcgagcgaaacgaagggcgatgcttgcggggatgcacgaaaggcgtctctgcggaaaaccgcttttctcattacggttgtgagcgcaaccggcggagcgggaaagagcaccgttgcagccttgtcggccttcttcgctcagggattcggctataaaacgcttctggtcgatgcggatttgcaggcgggggacatgcgccgccttgtaggcgaggaatcgcctgttgcgatcgacgaggtcatcgccgatcgatcccggctcgagaaggcggtaccccgtgaatcccagcccgcccttttggccgctccgaaaaagctcgagcaatcggagtctgtggcaagcgggctttcacgcgtggtcgacgacgcgagttcgcttttcgacgtcatcgttgccaacacctcgtcgcattgggacgaatcgctcgtccagcttctcgagcgttcgtcgcacgtgctgtttctggtggatcagcgccctacgtcgctcggtttgagcaagcatgttctcgagatgtgctcgcggtgcggcatcgcgacgacgccgttcacgttcgtggtgaacaggtgcacgaaaaacgcgttgatcacgtcgttcgaggcgacatgttcgctcggcgggtctcgtgcggtcgaattgaaggacggcggcaaggaagtcgccgagcttttgggggcgggacttcctctcgagctgatcggcacccgaaacgatctgtgcctgagcatggagcacgttctcatcgacattcttccaggtaacgcagcgttgggccaggcgcccccttcttcatcgccggaacgtacgaggcgcttcttcttgggacggcggaaggggagggcggcatgtctttgatgggccgcgctcgctgcgctgaaggcgaggtgccggtctatccgactgatcgaagcgcgttggctgggcttctgcgcgaatcggtgtacgaacgcatatccgcaaacgacattgccgccaaagcggcccgtaaccttcagctggcgagaagcgaagtgaagagcgcctgcagacaagcctttcaggacgagcgatgggcgacggtgccggtgtccgatcgcgaagggctcgtgggggaattgctcgacggcatgttcgggctcggcccgattgaggcgctccttgatgatgaatcggtgtctgaaatcatggtcaacgcaacgcaggcggtgtatttcgagcgccagggagtgctttaccggagttcgcagaggtttgcttcggacgatcaagttagagcgttgatcgatcgcataatcggacctatcggcaggcgcatcgacgaggcatcgccgacggtcgacgcgcgtttgccgcaaggccatcgcgtccacgcgatcattccgcctctttcgatcgacgggccggtcgtcacgatcaggaagttcaccgcgcatgtgatgacgcttgaggaaatggttgcaggaggatcgctcgacgagcgaacgagccgcttgctcggatgggctgtcgaatttcgaaaaaacattgccgtgtcaggcggtacgggtactggcaagaccacattgctcaacgcgctttcgtgcaggattccgcagcaggaacgcattatcacgatcgaggattcggcggagctccgctttttcgagcacccccatgtcgttcgtcttgaggcgaggccgaaaaacgccgagggcatcggagaggtgtcaattagggatttggtgagaaacgcccttcgcatgagacccgaccggatcgttgttggggagtgccgaggcgccgaggcgctcgatatgctccaagccatgaataccggacacgacggttcgctgacgacgcttcacgccaatgcccccgaagaggctgtcatgcgtttgacgaccatggtccgttacggcgttgaccttccggtcgatgtgatcgaatcccatatcgcaagtgcgatcgatctggtgattcagatagagcgaggtgccgatggcgtgcggttcgtttcgcagatagccgaactcgaccatgcgaccggctgcagaggctgctttgttcggacgcttttcgaacggagccatgcgggggcaccgggaaggtgggaggcggttccctcatgggtcgatgatctgccgcaaagaggcgtggcgaaagaatcggaggtgacgctatggaaatcgccgatgctctcatgctgctagccggatgtgcggcttttttcgggggcgttgcaatattcgcctcgattgctccatctgtgcgacgcgtgcgcgtgtcgagttcttttcggaaagaagaagcagagaagggcaccggtttggcgctgttgctgaggcggggcgttccctggtgcatccccctcgcccgggttgcattgcggatcgcgttccttgaaagcgcattcgatgaagtcgtggtgacggttcggattcgaggatatgcgacgacggtggaaagggcctgctcggtttggtgcgccgtttcgcttggcatcgttgttgcgggaacgctgatcggcgcctcgcccgtattcggcgcggcccttgcggtttgcctgagcatagcgtgccggttcgctgcggagcgaagccgggaggctcgcatcaaagcaatgcgcgaggaggtgccgaacgcgcttcgcgcgatggagtcgtgcttcttcgccggcctttcgctcatgcagacgtttcagcatcttgccgacgaagcgtccgaaccgcttgcggcgcttttctcgcaggcggctcatgggctcgaagcggggcgcacctcgcacgaggtgctcggctctcttcgaaaccgggcgagcattccggagatctccttcatcgccatcgccctggaaatccagcacgatgcgggtggaagcatgaagcaggttctcgaggcggcgcgtgactctgtggaaagcgatctcgagctgcgtcgcgcgcttcaggttcaaaccgcgcaagccaagctgtccgctcgagtcgtaaccgccatgcagtttgtcctgatggcgcttttctcttttataacggaggatttccttgccccgttttttgcgagtggcttcgggcttgcgcttcttgcggtggcgataacgatgcaggttgcgggcgtcctttgcgtgcggaacatgctgaaagtggggtttgattgatgtggatatcccatcggttgcagagatcgtagcgtgcgcaagcgcgggttgcatgggatgcagcacgtatgtcttcctgcgccgcaaagcagttgttcgcaggcgaaggcagcgcgttcgcagcgcggaaagggaaatgggtgttgccggcatgcccgagacggagtgcggcgggctttccgcatgggctctcgcccttgcttgcagggagagcatcaagccgacgttcgcgcgttcggcgcagaggagcgatcgccttttcgccagccgatcgaactctgggatcaaaacccttgcgctgaaggcggggctcgaatcgtcactgacggtttcggggttcgagtcggcgagggcgtgcttgtctgcggcctatctggcgatcggccttcttgtcggggcggttttctcgctcgagctttctgcgctgctcggtgcaggcggtggggtcgcgggttggttcgctcttccccgtgcattgaagtgcgaagccgctttgcgcagggagcggctggggcctcagctcgcagagatgtgcgaggtggttgccttgggcttgcggagcgggctgtcgttcgaccatgcgttctccttgtactgcgaatacttcgaatcgggttttgctcgggactgcgctcaggcgcgccggcagtggatgctcggcttggtgccacgtgacagagcactgcgcggtttgtccgattcgtacgattcgcccatgctgtcgagaatcgtcgaaggcatggtcagatcgctgcgattcggaacctccctggcggagacgctcgagtcggctgcggcggaggcgcgcagcgttcataaagcggaagtcgaagagcgagtggcaaaggccccggtcaagatgcttatccccgtcggagcgctgattctgccggcgatgctcatcttcgtgctcgggccgatcatgatagatttgatggaagggatataggtgcaggtcatgggctggttggcaaaggaattcaagcgcaaggcgatcgaggcgagggtgcgtgtcgcacggcgactttgcgatgcgcgcgggcagggcacgacggagtacgcgattctcgtcggggtgctcgtcgtgattgcgataatcgcaatcaccctgttcaggccgaagatacaggagctgtgggatgcgatcgcgtcgggcatcaacggactgtaggcggtgtgtgccgaagaccgctgcaggcggtgcgcgatttcggcttgcagacgatcgggggcaatcgagcgtcgagtacgccttggtcgttttcgccctgctggcggttatcgttgcatgctcgcttttatggaggaccctcgacgaggggctgttcgtttcccatgcggcagcaggtgcgtcccaccacatcgggcgagggtcgcctggcgccgttgccgacgtgcttctgtactgacgatgctctggaaggaagacgatgatgcgtttgattcggccatggaattcgaagaggcgaaccgggcttcggactcgcctcgctggaaggtgcggaagaagcgggcaggcaacggttgaggccgcgtatctgattccggtggttttcctctgcctgttgcttcttctgcagccggggatactgctttacgacatcatggtcatgcagggggctgcggccgagggctgccgattgctcgcgaccaaaaccgatgctgcgggcgaatcggccgaagcatgcgaggcgtatgtgaaacggcgccttgcatctatcccgccgcaggatcagttccacatgcatgcgggcggatgttcatgggacatcgtcatcgacggcgatgaaacgtcgggtcgcgttcgggtgactatcgcaaacgaggttcgccttcttcccctggtcgatgctgccggagtgctgtttggtttggtcgattcgacgggagcgtactcgttcgaggtttcaagcagcgccccgacgcagccttcgtgggcaatctcatcggagttcggcctcgatcccgaagcatgggtcggaggcgatcgctgatgcgggggcgtatcgggttgcacggcagcgccctatgcgggttggaacgctgcgtaccgaagccgctggcaggaagtgcgcccgctcggcgcgccttctgcgatgttatgcgcagcgaagagggactctcgacagtcggtatggtgttcgccctgcttatcactctatcgcttatctttacgggtgcccaagtctacgatgtggagtcgaagagcgcccacatccaaaacgttgccgatgccgcggcgcttgcagcggaaaacgaggttgcggagttctacatagtggttaggttgtgcgatgctctggtgctgacgatgtccctcacgggtattgcgacgatggggctcggcgtcgccgcgctttgcactccggcgacggcgccgctagccgatcggctcatcaaagcggcgacggacatcttcgatgcgagaaactcgtttgcgagtcgggcggcatcgggattgaacggctttcaggcgattctgcccttcctttcggcggtgaacgcctcatcggtggtgcaagcgaattcctcgaatgcgggggaggcggcttatttcggtttcgccgtcgtgttgcccgtcgaggggagcgagatcgaggtggggccgctcgacgccgccgacgatcttgtgcggagcgtggaggaaaacgaggagcggatcaagcaggcggcagaactcgccgaggaggcagcaggcgaggcgaaagaggagaagcgaaaagcgtttttggccgattgcggcaacgatcctggtttctgcatgtacgagcgagcggaaagccttgcaggcttgtcgggccttgacaacccgttgtaccgctccatcgatacctggagcttttcagtcgccctgaagcgcgcccaggcatattatccggcgcgtcttgcgcaggaggctcccgagggctcgtcgacagaggagctcgcccgttcggcgcttcgcaagcggttctaccagtacgctgtcagggagatcggaagaggctacgtgcgcgaaacagacgagtcgttcgaagcgtcctttcccttgctcgcgaagaacacggaggagatgaggtcgaccgacctttacaccgaaccggtctatccgatttcggtgggtgacgaggggtcggctgtcatgcacgcatggagcggttgcccgaacgtttcggcgggacaaccatcgagtttcggttcgatctatcagatggaaaccagttcgttccaaacgtgctcggcatgcgggttcacggcggcgagcttgggaaaggtggctgcggcgacaacatcgatagagagcggcttcgaataccattaccgtatcgttgcgacggccgccgatgcgtatcagaaagcgaaagagaaggaaaaaccctatgccgatgaagcgaaatcgttgacgcgaacgttgctcgaccaagtcggggatgctttttcgggcgccgcgtcctaccgcatcgaagcgaacccgccgggaagatacggcgccgtctcgtttgccgcggacgtctccgatctctcggctgcagcgcggtttcccagctcgtttgtaaagggaggcgattcggttggagctcgtgcggccttgtcggcggccactcttgcgagcgacgatccagaggagggaaaaacggtcatcgcatcggcgcttgactctttcgactcgggtgcgaccggcgctgcggtgggcgcgctcggcatcgtggccgacttgtggtcgtcgctgctgctcttctattcggagggaatcgaagcgctccagcggggcacggaacaggcgctttcccgtatgcctcttgcaagcgaaagcgggcttggcacatgggcggcgcatgcgctttcgggggtgctcgaatcgttggggctgaatccggcaaagctcgattctcccaagccggttctcgtgaatacggcccatgtgctcatcgccgatacgtcgggattctcttcgatgctgctggccgcaaaagaacagggcatcgtcctcggggatgccgccgatgccgatctgtacaccacggcgctttccgtgctggaagcgtcgtcgctcgatgcgctgttcgatttcgaagccggcataaagatcgccgtcgtccagccgttcggcgatgcgggaccctcgattcccctgacgatcgcactgccgtcatgggctacggcggctgcgggccaggcgatccgatcttcggtcgatcggatgaaggcggtttacgcgcagacgggaggcgttcgaagatgggaatgatgatgcttcgccgtgcgcgtttcaaggggttgcacgatcgttgcgggcagatgaccgtcgaattcgcggttgcctttccggtgttcctgatcgttgcggtcatatgcgtgaacgcattgcttttcttcgccgattgcgcatcgttcgaccgcctttttcgcgatgccgtccgcgtgcatgcggcgtcgccctcctacggccagacgctcgaagacagccgcgttttggtgctgggcactctcgaggaatcggtgcagcgcgacaacctttccatcgacgttgccgtcgagtcccaatcaggggggcatgcgaagttcacggcgaccgagcgttttgcaccgacgctgttcggcctcggcctcaagtcgtcggttttcggggtggcgttgccccagatcgagcactcggcgtctatgacgatcgactgctataaaccgggagtcctgctatgagaaggcgctgcatggcggcatgcgcgatcatcgtcatcggctttgcggcggtgcttgccatcgatgctctcgtggatcggttcgactgcgcggcgcaaaacgaaacgccgaggtccgcgcagacggcgccatcggaggctggctcggcggattccgccgccgagccagacggcggggttgccgatctcttcgatgcggatggcgcggctgtcggctctgaaggcgattcggaagggcgggccgacggtttcgacggcagcgctttgccaaaaggtgcggcagattgggctgaaagccctattgtgccgacgatcgacgacatcgcgcgggcgcgaggtttcgaaagaacggtttgttcggagtttctcgaggaggtaatggatcctgcgggattcgacgaggtgctcgtggccgacggaggctcggtggtggggctcgtcggtcggggttcggcggcgcagacgttttcccgcctgtcgtgcgagctggctgacaaggggtggatcggcgtcgatagcggtctttccggggcgggtacgttcgttaagagcgacggatcgtattcgtggctcatgctctcgtgtaccgatgccgacgggcttgtcggcgtggttatgcagatacgataaggaggaggatctctatgaacgaaagagctggctgcgaggcatcggaaaagctcgagccgtcacctgtttcgattgcggcaaccgcagcatctcgaatgcggggtttgcttgggacggaatcttgttctgaaacgctgtttttgattccctgtcggggagtgcatacctacggcatgcggtattcgatagatgtcgccttcgcaaacggcgatggcctcgttgtggcggttcgacgcgggcttgagccgaaccgccgggtgatgggcggaaaagcggtgatggcgcttgaaagggaacatgacccgagccggacgtggtttaaggagggggacaggctggccctttccatctttcgggaagcgaaacgagaggagtctcgatgaaggaatgccctgtgtgctcagcggtgacgttcgacgacatggatatatgctacggctgtctccatcggttcggcggggcggatgctattgcggcgtctgcgacggcggggggaaagggcgcgtttgcggttcagcctgcaaacggcagtcttgcgggcggtgggccgtcgggctgcaagccgtctccggatcgccctcgggaacaaggcggtacggatcggcccgcccgcgcataccgcgtggaaatcacgctcgtgccgatagaccaggctcggtagcgttttcgggttgctgcggatccgcagcaacgggcacggcaacgctttcggatcgctgtgcatcccaggcatcaagggtttctatgaggtcatcgatgcagtctgctccgattttcttgcatatcttgcgaaggtatgcttttgcggttttgggcaataccccgagttcttcagcgatttcgtgggcatcgaggttttcgagcagaagcagcagggtttcctcttcgcggggtgtgagggagaactcttttgccgcatcggagcagaagtcatcgagggcgacgatctgctcgggtatgggaaacgcgatgggcagcgcgatttggcgttcggtcgaatggctgagaagacatgccgcgccaagcaggaacaacacgatgcagctcgccgaaagaagggctgcaagatggggtccgagagctcctccgaacagcgtgaagtaaccgatgttcaacccgacgaggagaccgagccattgagcgagcgccaccctcgtccatcgctcggcgcggataacgaggatgctgagaggacaggagagggcgacaagcgcgattccgatgcccccgaggacggcatcgtcgatccgggcaggtgcgaggagcgatatcatgccgatgcccgcagcgcacgacaccagcccgatgcccgcgagcgatctgacggtgcttcgatcaaacccgttttgcaccctcagcacgatgtttgcgggcagcgagagcggcgaagcgtcgccgggctctaccgatgaggccgaagcggatgcgctttcatcgcgcgtgcagccgaatgctgtgcgataccagcggatcgatgttatcaggcatgctgcgaagccgccggcgcaaagcgccgcctgcaagcaaaccagtcctctggcaagaagcgattgggatacgtagggggcagcggcgacaacgatcgcgggcgcgccgacggcgagggcgaacccgattgcgaagagtcttgcgctcggccgtttgctgcgggagcgaggagtaagcggccgggaggtggcctccccgattgccaagaggcatgccatgatgtatgcgaagaccaaaacgaaagtcagggcaccgactggttgatacgaagcgggaaggatgggtttgaccgccagaagaacgccgatcgataaaaacggcatgcagagcgtgattccgaatgagcaggccaatcccagccagcgaacggcgccgatgcgctcgtcccgcatcggcttgcgggcaaaaggttttgccgccgccatggttgacggctcttcctgcgcggtggaggatagggctgctgtgctttctgctatggattccagctcgtggctcatcgtgtccgttcggatagtccgccgtgcgatgccgccgaaaatgcgacggctcttaccattatacctgaaactcgcctgccacctcggaatgctcacggaagaggtgcgattgggcagtgattcaagtaagagtaggggtcggggcgaacagccgcccacggtgagggagcgagagagctatcggcgcaagcaggctgggtgagcgctgcgaacccgcatcgggttcgcagcggcggtggtgctggaagaagacgtcgctgcggcaagctcgatcaatgggccgcctgggcggccgcgttgcctcccgcctcggcgcttcgtatccgaaggcgcccgattgcgagggcgatggcgaagatggccgccgtgaacaacagcatgatgcccatggttccgaaaacaggcgcaaggttcgtcgcgctgaaatcgcgaagcgaagtgatttggtcgatcgcattgccgtagtagaacgtcggagtgaaacgcgctaccgtgacgatcgcggaggcgccgaggtactcgagcggcacccataggccgcccaaaaacgagaggaccaagccggtgatgttgccggcagcgttcatcacgatctcgcttgtcgtcagttggccgatcaaaaatccgatcgaaagggcgacggtgcaaaacgcaagcgatgccaaggctatgaggccgagcgcgatcggcgagacggctgcaagcgaatctctgaacaccacaagtcccaagacgttgacccatgcccatgtgatgagggcgatgatcacgcatgccgcggcaatttgggagcttatcgagagcgcgctgacgggtgaggcgagatctcgcttcttaacctcggttctgttgaacgttcccatgactacggcgatgcagacgatgatgccgagcatggcggtgtatcccgaaaaccgcatgtaaaggatgtactgctgcgagatcggcaccgattcgcctagttgcaccatggtgacgtcggtcgagtcctccatgctgcgcgcggccatttccaccgcttccgcttcggtattcgcggccccgcttttcatcagcgttccaacgatgtcgaggtactcgttcactcggccgttcatcatgttcgcagctatcgattcatagcttacgatcgtgtcgataaggggagcttcgccgccgttttccagggatcgggcgaagtcttcgccgaatccttcgggaatgatggctatgtagggcgcgaggctttgggcggttgcgtcttggagggcctgccgcgaatcttccagctcgacgaccgttgtgcctgtgccgatgaaatcggcgatgccctgcgacagatcgcttccgtcgcggtcgatgacggcgatgctcgggcggttctcgacgaattcatcctgcggggcatcgatgttgctcgtgccgatgaacaggcccatgaacccgaggtagacgatgtagatgctgatgtagatcgggtgtttcgcgaatacgcggagcgcggccttaaagacttgcatagcgctgcctcctcatgaagatcgccgctacaagggcaagcacggcggttatggcaagtatcaccgtgatgacggcgaagaactggtcgagcgtgtcgtagtagtacaggctgtaaaacaggtctgctacctgtttggacgggtttgccgcctggacgagaggcgccgttctcgcgagctcgtcggcaagtcgctggctcgatgtgccgtagagtccggcgaacagggcgagcgtgcacgagagtccggtcaggatgccgctttttgcattctcgggcagcttgggaatgctgccgatcgcagcgccgagggcggttgccatgagcgaggccgcggccagcccgagcgtgcatgcggcatctctgccgccgaaatcgatgccgaggacgaatcggatgtagatgaagccgatcatcaggcaggcaaaagagagcacccagcatgcaccaagggttgccgctagcgttttcaagcggcttgttgcaccgaccgcgcgtcgagcgccgatcggggagaggttggcctgagttcgggtgatgcctacaagcgagatgttcgctgccatgatcgcagagaatccgagcagcgcatagaagtagcgtaccgattcagacgatttgttggcggtgaccgaaatctcttgggtatagctgccgagatcggtgagcgaggagagaaagccagggtcggcgaacgcgcccgggttttcttctgcgatctgctcgactgccttttgagtgtggaggtagcggtcgatcatatccttcagaatggtctgggatacgctggtgccggtttcgagtttctgggcgctcggcagatagagctgcggtttgccgtccgcgccgacctggatgcaggcttcgacttcgccttcgtccatcagctttcgggcggatgcgtcgtctgcaacgaagtgggcatcgagcacctgatcgtcgcccggttcgctgagaacttcgatcatcgcatcgaaactctcggcatcctcgaaggcgccgttgtcgacgatggcggtcggaataggctggaactcgtaggcctcttcgatattcgcgaacatgacgaagaaaaggcttgccagcacgatgggaaagagcagtgcccataaaaggacgttcttctcgcgaagcagcgcggcgatggtgtatttgaaggtattccacatggcggccgcctagtcgcgcagttctttgccggtgatttcgaggaaaacatcgtttaaggtgggcggttccgaatacacgcggccaaacgcgatgttgtgggtttggagcacatgcaggatgtcgctgaggttgtgcgtgccgctcgaacaggctatcgttacggttttcccatcgcatgaagcgcgccgcacgtgggaaagcgccttgacgtcggcgagcgccgcatcggaaaggtcgagcacttcgagttctatcttctcacctgttccgatcatagccttgagctcgttgttggtcccgcaggcaagcgttcggccgtggtccatgatcatgatgcgcgtgcaaatctcttcgacctcttccatgtaatggctcgtgtacacgacggtcgagccctcgcggttcaagcgttggatgccttcgaggatcgaattgcggctctgcggatcgaccgcgacggtcggttcgtcgaagaagatgagctcgggcttgtgcgcgatgccgcaggcgatgttcagtcgtcgcagcagaccgccggatagcttccgaggacgaaacttcacgtaatcctcgagccccacgaactcgatggcctcgccgacgagctgtctgcgtttcgccttgtcggaaacgtagagggcgcagaagtaatcgatgttctctcgcacggtcagctcttcgaacacggcgacgttctgcggaacgatgccgatgcgccgtttgaggtcgtagcggcttggcgccatggtctcgccgaacagcttgatctcgcctttgtcgtaggtgaggagctgcagaatgcagtttacggccgtggttttgccactgccgttcggaccgagcaggccgaacacctcgcctggctcgatgtgcagatcgaagtgatcgagcgcgagtacgtctttgtagcgtttgacgagattgttcacgtcgacgatgtccatagtccctcctgagtgtcgttacgatcattgtgcattaacgccgcaggcggcgaaagtgaccagggtcactgcctccatgacaaatgtcacaactttgcaatcggtttcccatgctgctgtttcgtgcgggttcctcggatacaataggctcatggagcggctcctcgacaaagccatcgtcatcgcctgttgcctggcgacggttctggccgccccgttttcaacgggcatcgtcgtcggcatgctgatcgccttgaccgttagcggcctgttcgagctttcgtcgatccctcggttttttcgctgggcggcgcttgtcctgtactgcgcgtcggccctgttcgttcatcagttcgtgctgttcgttccgctgatcgcctacgattgcctccgaaccgagcccgcggcgctcaaaggctgctggatcgttcccctgcttgttgcgttcgcctttcttccgatgcaatcgttctttttcgtgctggttctcaccatcgccgcgtgcggcttgtcgtttcgcacgtctcaagagaaagacgagcgcgagcgcttcacggcgcttcgcgacgaattgagggaggcatcgctgtctctcgagcagaaaaaccgcgatctgcaggacaagcaggattacgaggtgacgctcgcgacgctcaacgagcgggggcgcattgcgcgcgagatacatgacaacgtggggcatttgctcacgcgatccgttttgcaggttgaagcgctgcaggtaacgcatgcgggcgatccgtcgctcaccgacgagttggcgcaggtgggtgcaacattgcacgaagcactcgataccgtgcgcgtgagcgtgcacgacttgcacgacgattcgttcgacctgcggacccagctgacgtccattgctcgcgatgcgcggttccctgccgtcgatatagattacgatgccgatttcgtgcctgcgcccatcggatactgtttcatcgccatcgtgcgggaagccctttccaacgcggcgaagcacagcgatgcggaccgcgtgcgcgtatcggttgccgaatacccggcattctaccgcctgatcgtgcacgataacggaagcaagcctcccaccgacgtgttggttgacgatctttcccgcatcgacgaaggacgccggggatcgggcatcggtcttcgtacgatgggggatcggacgtgttcgctcggcggtgtgttccgagccgaataccaaaacggcttccgcttgttcgcatccataccgaaaggagaatcatgatgcagggggctaccgcgatacgggtcgtgataatcgatgacgatccgttcgtgcagacatcgctcaagaccattctttctgcgcaagacgatatcgaggtgcttgcgacgggcggaagcggatcggaggcgattcgcctgttcgatgagctcggtcccgacgtgctgttgatggatatccagatgccggaaacagacgggctttccgccgcgcgcggcatcctcggcgagcatgcggatgcgcgcattgtcttcctcacgacgttttcggatgacgagtacatcgtggaggcgcttcgcatgggagtgcggggctacctgataaagcaagaggttgccaacatagcccccgccgtccgatcggttatggcggggcagagcgtgctgggcggggaagtggtcggcagggtggatacgctcatgcgcggcgatgtcggcggcggggccggtgcacgtaccgaagatcgcggggaaaagggtgcggcagcccgcagatccgcagctttgacgcggggtctttccgggcgcgagtacgatatcatcgagttgatcgcccagggctacgacaacaaagaagtagctgcgaacctgttcatcagcgaaggcacggtgcgaaaccacgtaagcgccatcctgcagaagctcgatttgaaaaacaggacgcagcttgcggtgtacttctaccgggatctttcgaaggcggatgcttaaagcagttcttcaagggctttctcggccatggcgctcatgcgggaatcgagctcgatgtaagcatcgagtatcctgtcgccggcctcggtcagcgtgctgccgtgcgctccgtcgcgatcgagcagctgcacgccgagtgccgcttcagtttccttgatgatgcgccaagccttgctgtacgccatacccatgccctttgccgccgcgttgagcgagcccgtctcgcgaacgcccaggcacaggttcgcaatgccccgcccgaacaccgatccgctttccgatgcggggttttcgatgctcagacgaatactgggctttaaagcgctcagatctgccataggtttacctgccaatccggtcttgggcggccacaccgaacgatcggctggttaccgctggtccagaaactctgttatcgcctgctctatgtctgcgggcgcactgtcgattatatccgtaaacctgatttccgtctcgtcgagattcgcaaggtttgcgggaatatgatcgattcccgtttctttcgcgatgagctcgttgagtttgcacccgctgagagccgagacctcgtcgggaagcgcgccgcccggttcgatgccgtgcagcgcccgatagacgttttcgccgaatttcgcccaatgggcggtgcttgcgatgagcacggggttttcgccgcgcaggttttcggcggcttggtacgcgactgccgtatgggggtcgatcaggtagttgtggtgctcgaacacgttctttatggccgcaaagcacgcggcgctgtcgatggaatcggcggtgaaatggctccgcagcttggcgaacgtctcctcgtcgatgcgaaacgcccttctctcgcgcaggtcgtccatccacgaacggatggcatctccgttgcggcccgtcagttcgaagagctggcgttcgaggttcgaggatacgaggatgtccatcgagggggagggcgtcagcatgaactcgcgatgggagatgtcgtaggtgccggtgctgatgaaatcggcaagcacgcgattttcgttgcttgcgcacagaagcatgtcgatgggcgtgccgacctgcttggcataccatgcggcgaggatgttgccgaagtttccggtgggaacgcagacgtcgatcggctgccctggggctaccttgccttcccgaacgagcacggcgtaacttgaaacgtagtagacgacttgcggcagcagcctgccccagttgatggagttcgcgcttgagagggcgatcttccgctcgcttgcgagcgcctcgttgaactctcgatcgccgaagacggctttcgcaccggtttggcaatcatcgaagttcccacgcaccgcccagaccatcacgttgccgcccgattgagttgccatctgtttgaactggatatcgcttacgccgccgtgcgggtacatgaccgagatgcgcacgccttcttggtctttgaatccttcgagagcggctttgcccgtatcgcccgaggtggcgacgagaataaggaaatcattgtcgagcttgccctgctctttgagcgccgcagcgcttgccgagaagaagcggggaaggcattgcagggccatgtctttgaacgcgctcgtggggccgtgccacagctcgagcacgtgcgtgttggcgtcgagggtggtgatgggacagatgtcctcgtcgtcgaagttctctccgtacgcctgcgtcatgagattttcgattgtttcgggatccagatcgatatcgaacgcctggtagatgcgcgctgcgcgctgggcgtaaggcacatccgcgagcgccgtgatctcgccaagcgagaagcgcggcaggttttcgggcacgtagagcccgcctccgtcggccagcccgttgacgacggcttcggtgaaggggacgggggcgtcgcagagtccgcgggtgtcgatgtagcgattctggttcatctgagcagtccttctgtcttggtgaaaagccgtttcagtatactatgcgcccagatgaggcgttgtgcgcgggtgcgcttattccatgcaatgcgcacgggggactgtcgagtgggcctttacgggttgattttgagcgcgtcgaacaattcttggcgcgagttgatgccgagcttctcgtagatgtgcctcgtgtgggctttggcggtaccttctgcgatgaacagctcgcgagcaacggacgaaaggctcttgccttgggcgagcagctttagcacttcgatttcccgggggctgaggttcttcttctcggctatgtcctcgcaggcttgcatgacgcgcgccgcctcggaggtatcggcctgagagcgagaggcgccctttcccatgaaccggatgccccagcggattcctatctcgcgctcgctgagcagcagcactgtgagtgcgattatgaggaggatggcgatgaccgatatgagcggctcggcgatcgtgctggtaagcgagccgtcctggaggacgcctgaaaggcttcgtcccgcccatccaaagatgatcgttgcctcttcgagtccgaaaagccagatggcgataacccctagtcgcttagagatatcgcagaggaacaggaagatgatccatccgaacagcgtggcgctgaccgacacgcaaaaggcgccgatcacgcttcccccgaatccgaagaggggaatgagcaggagcccgcataccatgagcgccatcgggcttcgatacagcagggagaagtcgaagcggtccgagaagaagtacacgacaacgaacaatacgcctgcggcgatgaaggtcgcaagcgtggagtgcggacctacgagcgtcgcgtattccgaaccgaggcgcatcgagcagagcccgctgacggtgtcgtacaggatgagggcgacgatgagcttccaggggaagagcatcctgccgttcgaatcgggtttatcctcggttggcagcaggctgtaggagcgatgggcgagggcgagcgataaaagcggcagcgcgacaatcgacccgtacaggtacgggtcacgaaacccttgcagcagaaacgtcagagcgactccgagggccatggagagcgacaggtataccgcggctctcacggggttgaggcagctgtagatctcgcaccatatcagaatgaggatcgccgatccggctcccgcgagcaccgtactcggaatcgcgaggtagaaggctgtttcgggaaagctgagcgcgagcagctgcgcgagtgtcgagagcgtcatggcgccgaagcagagaaggcaggcccagcgtttgccgttgaggggcgcgatggagcgagccgaaagggcgatggcaaccgccgccacggcgagaacgagatcgtacatggcttttccgccgcccgaaatcataggcgacgagaatgcggggttcgcgtaggagagcgatacccaggcgcgccatagggcaaacccgagaaatgccagcggcatggtggcgagtcctgcgagcttggacgagagcggcgttttctgcgcagtcgattctatggcggtacctttacttcggattgtctgggtgggcgttgccgaaagcggcagcgcggtttttcgattatatacgtcaagcacgaacgtgtgcggccaatcgggtgtttatgcggggtgtttataaaaataaacaggtaaaaaggcacacggtcgatggcaagaagcgttgtgcgcggcacagtgtttcctgcggttcgggatgtatcgcgcagcgtcgcataaggggttccgagccgaacggcaactattacaggaggtaacaatcatgggattttcacatcatgcattaagccgaagggatctgctgaagttcggtggtgtcgccgcggcggggatggcgggcgcgagcgtgctggctgggtgctcgcccagccaaggcgcaggcgccccctcggcgcctgcggccgacacggcagcggtggcggggtcgaacgtgccctcgtttctcgcgaaacccgagccgattaccgagttcgctgagacgaaagactacgagatcgtcgttgtgggcgcgggtgtttcgggtatgtcggccgtgctgacggcggcgaaggcaggagcacgcgtcgcttgcctgcagaaggagcccaccccctcgtcgcagggcaacatgggcgccggtttggatctcgagaagacgagccctgccggtcgcgcagcgctcgtgagcttccttatcgagctgtcggaccatcgtgccgaccgcagcctcatcgaggcatgggccgacaacagcgccgctgcgctcagtcagttcgaggaagctgctcgtgcgggtggcgtcgaagtgaacgccgacgagcccgatgccgatcgcgtgctcgccatcaacggctacgaggtgtacctccatgcgaatacatatttcggtatcggccatgacgaagtggtgaaggctgttgctccggtcgccgagcaggcgggggcagagttcttctacagcacgccggcggtgcagctcgtcaccgatgattctgggaaggtgaccggtgtcgtgggcgagggaagtaagggagagtatatcctgttcaatgcattgaagggcgtcatcctcgcaacgggcgactatcagtgcgatcgggatatggtggatttctactgccccgatatgagcgacttcccggcgttgcagctgaaccgcacgggtgacggccacaagatgggcgtctgggccggcggcgagatcgagcccatcggccacacgaagatggtccatgacgcgcgcgtctcgcgtgccgatgcgccgttcatgctggtcgatagcgacggcaagcggcttttgtgcgaaggccctttgcagggatacctcaacaactacgtgagagggcacattcgcaaagcgggcgatccgcttgcaggcacgttgtattccgtggtcgatgcgcagtggcaggagcaggctgctgagtggcagaaggacgaccctgcgatcaacgtgcgcacctgcagcgtgtactacgaaggcgatacgatcgccgacgcggttgccgctgccgcgaaggacggctacgttctcgacgcagatgccgtccaggcgtcggtggatcgttacaacgagttgtgcgagaagggcagcgacgacgacttcggcaaggatcccaagttcatgtgcgcgatcacggagcctcccttcgccattattccacatgatttcggttacggcttgtcggcgatcctcggaggcttgctcgtcgatgcggacaatcatgtgctcaagactgaggaccgcacgccgatcgagggcttgtatgcggtagggaacgtgtcgggttgcttctacggtggctccgactatcccatggatgtgctgggcctttcgatcggccgagccatcacgtcggggtatctggctgcgaaaacggtttcgtccctgcaataacacgcgctgcgccgcagggtgcccgacgggctctgcggcgcatgccgcgtttgggcgagcttacttttggcctgtctgctcgcttgtcgtgtccttttcgtcttcgatcttgatccaaggatcctccttgcgggcttcagcgatgagctcgtcgttggtcttggacagcgcgccgacgacgagacatactatgccgcacagaatgcctccgacgggaaacgcgatccagctcacggcgaacccgccgtagccgcctttgatgtagttcttgatgtcgaagcggtcgaacccgtctatcgacaggctttcgaagctcggcaggaagccccacacgagaaacaccaccacggcgaacagcatgatggcgccgcagatggatccgagtatgtggtcgcgcttgagctcggcggctgtcttcgcgcgcggatcgctcggcttgacggtgccgtctttggtgatgtgggtgatttcggtgcggtcgtacttatccttctgcatgctggcgtacacgagtatgcatacggcaaatcccatgacgatgagaaacggtcccatgaagaggtcgaagttgaagcttgtgaagccgaggtcggtgatgttgccgtgctcgggggcgagcgccatgagtgcgaccacgtcgagtaggatcagcgcgacgccgatggcgatcataagcgggaaacggcggccgaaccggtcgagcacgtcagccggatagcgcggatcgatgtttgcgtgcttgcgcttgaattccgaatgcctcagtcctgcgatgatgccggtgacggcggcgatgatgatgaagaggaacatggcgaccgttgagagattcgaagggaatccgctcgcatcgagcataatgaggatgccgatgccgatcaggacggacagcggtacggcggcgatcgccatgccgtagtggttcatgtgctcgtcgtatatttcggtgtcgtgcacgttggcaatgtgcacgctgccgcgcatgagatcgtcgaggttcgtatggtagatgtcgcacagggcgagcagcttgtcggtttcgggaaagttgatgcccgcttcccatttcgagatggtttggcgggatacgccgagctgctctgcaagggcttcttgggtgacgccgtaatgctggcgaatgtagacgagattgtccgcaaagctcatgggtttaaggtcctttcgaggttggggctattgtatccgatgtgcggcgtctgcgggtcgtggcgccgttctcatcggcgatccagacgatacggttgcagcgccgcaacgcccagcaatttcgtgttgcgtttcgctcttttttacgcgcgttcaggttgcggagcttgtgaacaggggttttgtgaaactgcaggcaaggtattttgcgctctcgaaattagtgggtgcgggtttgggcggttggtgcatgacgctgtggatcggctgctctcaaagcggatcttcgagcacggacggttggtgaccgcattgctttcccgatgaaagggttcgccaacgccgaccacctgcaatttacccgcttcggataggtgcaactatccgaagcgggtagtaccgccaacgggtacatgcgactagtgttgacgatccgggaatgcttgagggtttggtgggcgcttgttcgctgctcggctttgtgcacggcaggacggcgtttgcatctttgttgtgtttccgaatgcaaggagcaatgtaaaggagaagacatggactgctctatttcgagaagaaggtttttgcaagttgcaggcgctttgggtctgtcggctgcgacggtcggattcgtgggctgctcgtctcagccagggaaggatgttggggaatctcagccttcggcttctgcgaactatgatgtcgtgatcgtcggcggaggtcttgcagcgatgtgcgcgacggtgacggctgtcgaggcgggcgctcatgtgctcattatcgagcagcagaaagagcttggcggcaacgcgcgctatgccgtgggttgctttaacggtgccgataccaaggtgcaggccgacaatggcgttacgggcgattcggtcgagttggcttacgaggatttgaagcttcggggacggcatggtgacagctatcgcgatgacgctgcgaagtattacgcctatcatgcgggagagacggtcgattggctctacgatttgggtgtttctttcatggagccctatgctggatacgaggagtatccccctaccgatgttgcacgctgctatgacgccaccaatggagccaacgatgtcgttcagcacatcaacccccttatcgatgaggggagggatgccggccttgtcgacgttcttctgaacacccacgtcgaagatatgatcattgaaaacggggtttgcgttggggctcgtatcgacgacggcacggagtacaggggcgcttcggtcgttcttgcagcgggaggttatgctggaagcaaggagatgctcggaaaagtgttcgaccgcgtgtgcggcggaggtatggagtacaacattggagagggctatcgtttggccatgcaaacaggcgctttgatggatggcctggatttcaattacagttatcctggatatctcaacgatgctgatttcttcggtaactcatcggttcagacgcgctgtccaggtggctgcgtgtgggttgatgttcatgggaaccgcgtatgcgacgagtacgccgtcgattcggcatatcgggcccatgcgtatatggacgccgacaacaataccgtgttctatgtattcgatcagtccgttgtggaggagaacgcaccgtttatcgttggggatgaggacggtgctctttttgattcgtatcttaaagaggggaagcatatttttgccgccaatacgcttgatgagcttgccgggaagacgggggtcgatgcggagaacctgattgcgagcatcgagcgattcaacggattttgcgatacgggcgtagacgaggagttcggtagaaccgagtacctcaacaggctcgaagggccgtattacgcggtggagactatcgggaacgtgacgatcagcaacggcggcgttgtcgttgacggtagcgctcaggtgctcgacgagtccgaaaagcccatcccgggtctgttcgctgcgggggaatcggtgtgctgcctcgagttcttcggggaaagcgccatcgggggcgcttatcttacgaacgctgcggtgatcggtcgtttggcaggcgagtcggctgccgcttacgcgctggcctagggtcccgttcgccttcggaattgtgctgatgctgcattcggagttgcgattgcagcatcagccttcggtctcaacaagatcgagaagctcgcgtttgctgtgtattccgagttttgcatacaactgcttggtgtgccatcgtaccgtgctttcggaaatgtacagctctttggcgatcgctggttttgcatagcccctgcaggtaagaagcataatttcaacctgtctttctgacagatctctctttcttccgattttgtcgcacgcccttttcagcgcttcgttcacgtcgcttgcgtcttgtggtctcatagtgcgacctccgagctcggcgatggcgaagaatcgattgaccatgagcagcacgatgaatatcacgccaagatatacgaaaccgtccgagatttgggagatgacgtttgaaaacggcgtttcaagggaggcgattccgaccatgagcgacagctcgaacagtcctcttcccagcccatatacaaccaagggattgtggccgtacgtttttgccgattgatagaacgttaagatgaagaaagtgctggcgatgtcgcagacgaggattaccgatacgggaatggcgctttgccgcgtgtccccgaagaacaccgttgcaaaatagagaagcagcacggcggctgtcgtggttcgcagggcgaggcttcgcgcgcgtctgccggctttcaaatgaatccaggctagcagaaacaacggaactagaaattgaagaacatgcgccacaaggaagggttggggtgcaacgtcggctgtgacgttgtgcatgatcccgaagacaattccgaatacgatgagctcggctgcgactccggtggtgccaagggggtttgattcaggtattgctcggggtcggttttcgtcgttgggcgaaacggatcctgcgccgtgcagaaaagccatcgatattatcgatgaaataccgatcaggatgaacaacgagtctggagagatatcgccaaggggtatcaatgcgattcggagaagcggttcgatgagggccgaaaccaagatcaggtcgaaggcttcgtttgccgagtacgtacagaatctcgtaaaccattgagcgaagaaaactaaggccccgcctccgcacagaaggcccagaacgatcagggaggcgtcttgtcgcattccgaaataattgacgagaatcggcgcaaggcacatgacgaccgatgcagcccaggcgacaaacggtggtatggatacgggtttgcgtttgcagaaaagaaaagccgcaatgcccatgccgccgaatccgaggtggtagaagatgacgtagagtccaggaagagaaaactggatatgcagatagagctccgcgaaggcgaagccgagcatgagggcgatgatgctcccccttttcagatgacctttcggcatgagcgactcctgaatgcgtctcttgcttttcgatcgtgcgttgcgtgcgctgcggctccgtagcttcgttcggcggttgagagcactgccgaagcgcgctcgcaaattgcagggcaaactaatctggtgatcgttggcattgtaccctatttgattttactggatacgagcgacagcatctgccgtttcctccatgacacggcagcgggtttgtgcgacaatgaacccgaaagcagacgactcgcacgtaaggtatcgatacacatgtcagcccagttcaacattctggcggcaaatccggccgccgttgccctattgcagcaagacctcggcttgccgcatttcgtcgccgccacgcttgttgcgcgcggaatcgatgcgcctgaggctgcgagggagttccttacgccttcgcttgagcgcgattggctcgatccgtacatcatcccgggcttgtccgatgtcgccgatgcgctcgaatcgtgcatcgaatcggataagcacatcatcgtgttcggcgatttcgatctcgacggcatctcggcaaccgcgacgcttacccgagggttgcgcgatcttggcggccgcgtcacgccgttcattccgctgcgcttcgaagagggctacggactgtcggtcgaggcgttcgagcgcatcaaagagctgtcgcccgatttcatcgttacggtcgactgcggcatcgcgtcgaaaaacgaggcggaggccatcaggcgagaaggcgtgggtctggcaatcaccgaccatcatgaacccgccgatctggtgcccgagggcgtgccggtggccgatcccaagtgcgtgcccgactgcccgagcgccattctcgccggcgtgggtgtcgccctcaagctcgtgcaggtgcttggcgggcgtctgggcaagccgcacctgtggcgcgagtacaccgaccttgccacgctcggcaccgttgcggatctcatgcccatgcgctccgagaaccgcgcgttggtaaccgatggccttgcgcgcatgaacgaggctccgcgcccctgcatcgccgcactgcttgccacggcgggtgtcgccgataaggagcttaccgctaccaacatgagcttctcgataattccccgactgaacgcggcgggtcgcatgggcgatgcgcaggcggctctcgatctgctgctttccgacgatttcgaagaggcgagccggaaagccgccgagcttgagagcatcaacgatacgcggcggaccatcgaagccgagctgtctgagatcgcgaaggttcaggcggccgagctgtatcacggccaacgcgcgctcgtggtgtccggagacggatggcacgagggcgtcaagggcatcgtggcgagccggctcgtcaacacctacggcgtgcccgcccttctgttcacgatcgacggcgacgaagcgcgcggatcgggccgcagcgtcggccaggtgaatctgttcaaggccgttgagagcctgtccgatctgcttacgcggttcggggggcatgaggctgccgtcggcgtcacgcttccagccgataagcttcccgagttcaccgagcgcctgtgcgcttgcctcgacgagcttccgcccgacagcttccacccgcgcatcgagatcgatgcgtgcgttgatctgtccgagctcacgctcgagaacgttcaggagctttcgcagcttgcgccattcggccaggaaaacccagtgccccgctaccttgcccgcgacgttacgctgacgggctgccgcgcggtgggcgccgagaagaatcatttctcctgtcagctttcggacgggaagcattcggtcgcgggcatcatgttccactgttctgatctcgaaacgctcatgcactgcgacagcgtggtcaacgccgcgttcgaggtgcagatcgacgaatggcggggcaggcgcacggttaaagccatgctttcctcgatagcgcccgcccgcgcctgcgcggggctcgaagcgtgcctcaaccccgaaaacgtgagcttcgtgggcgatctgtacgcgacgagcgatgccgagatctgctccgattgccaggaaagcgccgaagcggtcgaagcctacgaggcaaaacgcgataagaaccgcaggttctgggaacggaaagccgccgaagaccccgatgcgctgcaggctgccgtcatcgaggccctcatcggggacggcatcctgcacgaatcgcagcgcgaagtgctcgatgccctgggccaggggctttcgacgcttgccgtcatggcgacagggcgcgggaaatcgctcaccttccaggttcatgccgcatgcgaggcgctgttgcgcggcgggacgagcctgttcgtgtacccgctgcgggccctgatcgccgatcaggcattccatctcagcgaagcgcttgaggcgttcggcatcgcgtcggcggtgctcactggcgagaacactcccgaagagcggcgtcaggcgttcgatgccttgcgcgagggttcgtgcgacatcgtgctgacgacgcccgaattcctggctttccatgcagacgaattcgcccgtgcgcgccgcatcggcttcgtcgtggtcgacgaggcccaccacattggcatggcgaaggcggggcagcgcgtggcctacgcctcgatcggctcgtctatcgcaaagcttgggaaacccgtggtgctcgccctgacggctaccgcgaattccgaggtggccgaagccgtcgtatcgacgctcggcatcgaacgcacggtgctcgacggcacgcgccgggaaaacctcgaaatcgacgaccagcgcaacctgaagaaccgcgagagctacctggccaacatcatcgccggcggcgagaagacggtcatctacgtgaattcgcgtgagcaatcggtggcgcttgcgcgggcccttcgcaagcttgcgccgcatatggctccgctcatcgggttctacaatgcgggtcttacccgttccgatcgcaagcggatcgaagagctgttcagaaccgatgcgcttgccgtgctcgtggcaacctccgcgttcggcgagggcgtgaacattcccaacatccgccacgtggtgctctaccacatgccgttcaacgaaatcgagttcaaccagatgagcggcagggcggggcgcgatggcgagcgggcggtcatccaccttctgttcgggcgcggcgacgctgccgtaaacgagcagcttttgcgcgatacgacgcccgatcacgattgcctcgcccaggtgtaccgcgaactgcggcgcatgcagcaggaaagcgcagaagaatatttcgctgcgaccaacgccgacctcgccgcgaaagcgagcgccaaccagcatgcgcccgtgagcgctgcgtcggccgcttgcggcgtggcggtgttccgggagctcggactgatcgaaacgcacaccgccttcgtttccggcgaagccatgcgttcgattcacgtgaaggcagccggcagcaaggtggagctcaccgatagcgtacggtatcgcgaaggactcggcgaacgcgagatattccaatctttccgcgaatgggctataaagagccaaagagaaatattgcacaagcgcgtgtccgggcccatccttcccggcagcgcaaaccgatagacggaagggaggacgcatggagcaatccgagcgaggcgaaagccgccgcgcaggacgcgctgcgacgaaggacgtcgtggtgccgaccacggtgcatgcggttcccgacaacgatatgacaagcgggtcttccgaaacggaagccgtgcgcggcgatcgggccgatgcggctaagaaaaaaccccgtaaagaaaaagaagagcttatcggagagcccgctaaggcgaacaaggcggccgcaggcgaagccgatggagagctgctcggccgtgcgcgcgcgaccgaaaagagcttcgcccccgaagccaaggcagatcgcaaacgcgccgaaacgcctgagatgcggttcgccgagctcaggcgccaaacgtcggcgtacatgaacgagcccgacgaggagatgctcgaaaaagcgtttctgttcgcgcgcgatgcacatgcgggccagtgccgcaaaagcggcgagccgttcatcgcccatccggtagaggttgcgcttatcctcgccgatctgcggatggacgtcgagtccatttgcgcggcgcttctgcatgacacggtcgaggataccgatgtttcgagcgagcaggtcgccgaacagttcaatccgcaaatcgcccagcttgtcgatggggtgaccaagatcacccgtatcgaagtcgagagcctctccgacgagcaggctcagaccatccgcaagatgttcgttgctatgaacaaggacatccgcgtgatcgtgatcaagcttgccgaccgtctgcacaacatgcgcacgctttcggccttgaaagaggatcgccgcatcttcaaatcgcgcgaaacgcttgagatctacgcgccgatcgcgcatcgtttgggcatcaactccatcaagtgggagcttgaggacctcgcgttttactatcttgagccgaacaagttcaagcaggtgtcgcgcatggttaccgaaagccgcgaagagcgtgagaactacctcgagcagatcatcgacatcctccacgaagaactcgacaaggtgaacgtccaatcgcagatcatgggcaggccgaagcacctgtactcgatctatcagaagatgacgaagaagggcaagggcttttcggagatatacgatctcattgccgtgcgcgtgatcgtgaaatcggtgaaggattgctattcggcgctcggtgcagtgcatacgctctggcatccgatgccgggtcgcttcaaagactatatagccatgccgaagttcaacatgtaccaaagcctccacaccacggtcatcggtcccgcgggccgtccgctcgaagtgcagatccgcaccgaagacatgcatcgtacgagcgagtacggcgtcgccgcccattggcgctacaaagagaagggcggcaagggcgatatgggcctcgaccagcagctcgcatggctgcgtcagatggtcgattggcaggacgaaaccaaggattcgcgcgaattccttaaatcgctcaaggtcgaccttgctcccaacgaggtgttcgtgttcacaccgaaaggcgaggtcatgagcttgcgggcaggttcgacaccggtggatttcgcctatgcgatccacaccgaggtgggcaaccattgcgtgggggcgaaggtgaacggctcgatcgtgcccctcacctacgaactgcagctcggggatcgcgtcgagatcctcacgcagaagagcgcaagcccttcgcgcgactggctcaacgtggtgaagacgccgtctgcccgcagcaagatccgctcgtacttttcgcggatcagccgctccgacgatttgcagaccggccgcgacaagctgacgcgcgagatgcgcaagcacggtttgggaatctcgagcgcccagagcatgcgcgccgtcaagacggtctccgaacatttgggctacaacgatcccgacgatatgctcgtccagataggcacgaacaaggaaagcgccacgcatgtggcgaaccgcctgctgaagattcttgtcgaccgcgccgaaaaggatgccgaaacccccggtcttggttcgtcggacatgtcgacgggcaagcttcctcccatgctcacaagcgtgaagcgccccaagaaacacgaggcgcacacctccaacggcatcgtggtgaagggcatcgacgacgtgctcgtgcgtctgtcgcggtgctgcaacccggtgccgggcgatgatatcctcgggttcgtgacgcggggacgcggtgtttcggtgcatcgggccgattgccccaatgccgtcgatctcatgcagcaccccgaacgcatcatcgaagtatcgtgggaaaacgcgccgacgcagaacgcgtcgtacaaggtcgaggttttcatcgaagcgcttgatcgcatgaacctgcttcgcgatgttacggtggtgcttgccgatatgggggctaacgtcctttcgtgcacgactgcctcgcatcgagacggaatggtggagatgcgcttcttgttccaggtatccgatatctcctacatcgacaagatcacaacgaagctgcgcggtgtagggggcgtattcgatgcgcgccgcatgcttcccggtgaaacctcccgtaagaaagggaaatagcatgtccgataggtataaggtgaacaggggctgcgtcgacatcgagtttctcgtgttgggcatgctttcgaacaacacgtacatcataggcgacggcaaggcgacgatggtcgtcgatccgagctgccacgccgacgagatcctcgaggcgctcggcgaaagaaagctcgatgccatcgtgctgacgcatcatcactacgatcatgtgggagccgctcgcgaactcaaggatgcaacgggcgctaccgttatctcgtcggtcatcgacgcccccttgatcgaagagggcagccccgcgctcggcagcggccagcggatgacgccgtgtcctgtcgatagcttggtcgaagacggcgatatcgttcaaatcggcgatatggcctggaagatcatcatgacgccgggccacaccaaaggaagcatgtgcctgttcatcgatccccgcttcggcaaccatcccgaaaacgagccggtgctcctctcgggcgatacgctgttctgcgcttcgatcgggcgaaccgatttcgaaggcggcagcatggaggatatgcgcgcatcgctcaagcgcctggcttttctccccgacgaaacgcttgtcctgcccggacacaacgatcttacgaccatcggcgccgagcgcaagcggattttcgcccagttcgcgtaggagcctcgaggcggggctcgatccgtatggctttcgggaggcgtcggccgttcgcctttcgggcgatttccgttgtctcgatgcgcggcaacgacgaccggatggataatcgactttacgagaattttacacaacgggccgccttcccgcgaaaaagcggggcatgcggcctttttctttgtaaaagatacgttaaacttatcccttgtctgtgccatgcccagatgaggtttaaacatcgtcggaaggtcacacgtggtcattgaatggggtgtattcctcaccgagctcatgtccaatcccgccttggtcgcggttacccttttgaacatcggcgtcatcgtagtcaacggcgcaaccgatgcgcccaacgccatcgcgacggtcgtgtcgactcgttgcatgtcggcgaaggctgccatcatcatggcggccgtctgcaacttcttcgggcttttggtcatcacgctcgtctcatccgccgtcgccaacacgatattccacatggttgatttcgggggagaccatcatgcggcgctcatcgcgctcatggccgccatggttgccatcatcgtgtggggtgcggcggcgtggttcttcggcatccccacaagtcagagccattcgctgatcgccggtcttaccggcgcggcgatcgcgctgcagggaggcctctccggcatcaacggcgcagagtggatgaaggttatctacggcatccttttgtcgacgttcatgggcttcggctttggatggctgtgcgccaagatcatcgccaaatgctgttcgggagcggatcggcagaaatccgaccatgtgttcaaatgggcccagatcatcgcaggcgcaggcgtagcgttcatgcacggcgcgcaggatgggcagaagttcatgggcgttttcgtgctcgccatcacccttgcaacgggcatcggccaagccgatcagatgatcctgccgatctggctgatggttttctgcgcgctcaacatgggccttggaaccgccatcggcggcaagaagatcatcaagagcgttggcatggacatggtcaaaatggagaagtaccagggctttgcagcaagcttcgccgcgacgatctgcctcatcatctcaacgttcggcggtctgccggtttcaacgacgcacaccaagaccacggccatcatgggcgtgggagctgccaagcgcaaaagcgcggtgaagtggggcgtggcggtcgatatggttaaaacctgggtgctgacgtttccgggctgcgggttgctcggtttcctctgcgccaagctattcctcatgattgcgtaaggagcgactgatgggcaagaagagcaagaagttcgattatttcgaggcgttcgagcgccagaccgcgcttgcggtcaaggagtcggaactcctcatcgaagccatcgagaatttcacaacggccgaggccatcaaggacatcatgccgcgtgctcaggatatcgagcacgaaggcgacgagatcagccatgacatgtatacggctatcgcgaccgatttcatcactcccatcgagcgcgaggacatcatctcgctcacgcagtacctcgacgacatcgtcgattacatcgaagacgtgcttcagcgcttctacatgtacgacatccacttcatgcatgaccgggcgcttgagttcgcccagctcatcaacaagagctgcaaggcgctcgaccatgcgatggaggatttccgcgacttcaagaaatccaagacgttcaagcagtccatcatcgatgtgaacagctacgaggaagaggccgatgatttctacatggctacgatccgcgagctgcacacgaaggatcgtgacaacgcgctgcgtgtgctcatctggtcgcaggtgttcgcccgcatggaaaaagtcacggatgcctgcgagcatgcggccgacaccatgcgcacgatcatgctgaagaactcgtaacaggtctcagcacttacgaaaggcgcagggggcgacagtcgttccgcttgaggcacggcgcgctcatttcaatcgatcgaacgtttccaccggcttcggccggtggtttgctgtgcgctcggatcgcggatcccggatcacggatcccgttgctattcgtttagcgtgcggtcgttcgacgcgcgggggtcgggcgtttgcggttcgaagggatctttcggctcggcagccgtctcttctcggatttcggagaggtctttgacgagtatccgatcgctcggatcgcttggctgcgacgcttgctcgaggtcgggtttgcgctttcgtattcggatgagcctgccgcttgcctgcagctccttttccttttcgcgttcgatcttgcccttcgggggctttacgcggcgcgctacgcttttcaccggtctggcgacggccttggtgaccacatcggaatagtcgcgcggcggtttcgttcgccacccgaagagcagcgaggcgtaacgcaggatgagcacgagggctacgcatgcgaacggagcccattggtcgagcatatggctaagcgaagagagctgttcgggtaggtggttctgcttcatgagcgcgaacgcggtggagccgatgagcgcagccgagccgtagagcgttcccgcctggaacgcttcgggttctcgattcatgaaaacgtcgcgcatgatgccgccgccgacggcggtgatggttcccaggatgatcgaggggatgatgtcgagtccggctgagaggcccttgcccacgctgatgaccgcccagagcgcaaccgagatgttgtcgagcaaatcgacgatgggatcgaggtaggtggcgagcttgccgaaatagaacaccacgacgccggctattgcgcaggctaggatgagcgtcggcttctgaaacgcgtagatgccgtagttttgaagcagcacatcgcggatcacgcctccgagcaagccgcaggtgcaggctatgcagacggtgccgaatatgtcgtagcgcgcccgcacggcgctcatggcgcccgaaaggccgccggtcagtgcggcggccagctcgagccagaacggtacggcgaggacggtttcgagcatggcgctattcgtcgtctacgatgacgagcgtggcggttgtcggctcgcccgagaaatcgaggtcgttcgtgatggcccgggagccttccacattgaagcctttcgcggcgaacgcggcgatgttgcccttcgctttttcgcgggcgttttcgaatatctcccagaatcccagatcgctcgtctctccagtgaaggggttttcccaggtggcccgctcgtggttgtcgaactggctttccgtgatttcgagggggcgatggctcatcgagcggtagaacgaataggggcgcacaagctcctcgatgcggctgatgacggtccgcttgctgccggtgggcgagtagaagagcccctggacgaagcggaagctgcgaacggcagtagcgaacatgtccgagggaatgaacaggccgtacaccgtcatggccgcataggcgtacatcttcgaaatcgtttcgagggcaaaatcgctcgctttgaggatttcgacggaagggttaaacgaggctatggtctgatggcgaacggtgaagagcaccatttcgtcgaactcgctttcgatcgtgccgtggacctcgtggccgtcttcgcgggagaggccgtcgatgcccgcatcgcaaatcgcatattgctgcgcgaacacgagcgggtgcatcgacgagtcgagcgtgtagtggcataggaatccgagcgcgtaggcgcgcccgacggggtattcgtcttcggaaagcacggaaagggaatccttgaaggcggcgatgagctcggtgggcttgacgctgtgcatggtcgaaccaagctggttgaactcgcgcaggctcgggttgataacggtgtagaacagcgggtcgggaccctggttccccagaagaaacgcttcgtactcatcgcgcgtttcgccgatggatgcatgcagctcgtggtagacatcctgaccgaatgcatcgtgggttatgattgccggcatggacggcctctcattcttgtcatttattttactgaagcgccagcccccatcatatacaattgggagagagttgaaaacttgctcgttacgctcttgttgaaaggatcacacgtggctgcattgaagttgacgaagcaagagaaaagctgggttttgtacgatgtgggaaactcagcttttgtcttgctggctactgcgcttattcccgtgtatttccaaacgctcgccgagccgggttcctcggtggtggtggcttggggctatgccgaaacggtggcctccctcttgctcgcgctgctcatgccgatcctgggaagcctcgccgatttgaagggcaacaagaagaagtttttcgtcgggtgcgtggggacgggcgcggtggcgcttgccgccctcggtctgccttccacggctctgccgtttctgatcgtctatgtggttgcctcgatcatgctcaacggctcgatggtgttctacgatgcgttcttggtcgacgcggcggcaaccgattcgcgctatgacgaggtgtcttcgcagggttacgcttggggatacatcggttcgtgcgtgccgttcatcgcgtctttggccattgttctcggcggcggcgccatcggcatcgacatggctctcggcatgaagatagcgttcatcatcacggctgtgtggtgggttgctttcagcattccgctgatcaggaacgttcatcagacccatttcaaagagcgaacggtgcatttgttcaaggatacgtttaccgggcttgtttccacgttgaagaagattttcaaggataagcagctgcgcctgttcatgcttgctttcttcttctacatcgacggcgtccacaccatcatcaagatgtcgacgagctacggcaccgatctgggcatcgatgcgacgcagctcgtgctggctctgctggttacccagttcgtcgcctttccctcggctatcgtctacggaaggctttcgggcaaagtgggaacgaagcgcatgctgcttgtaggcgtgttcgcatacctgtgcatcacgctgtttgcggcgttcttcctcaaaagcgcggtcgaattctggattctcgccatttgcgtgggtctgttccagggcggcatccaggcgctctcccggtcggagttcgggaagctcattcccaaagagcatgccaacgaatactacggcttcttcgacattttcggaaagtatgccgctatcatgggaacgttcctcgtatcgtttttcacgcagatgacgggtaacccttcgatcggcgtgctgtccatcgccatgctgttcatcgtcggcttcatcctgctgtggaggatgcccgaaaaggcataggggttcgcttccgggcatcgaaaacgctgggagacgctgtctgcgccgagcgcatcgcttcttgatgcgccgatcggagaggtgcgatgccgaagggcatggacgggtggatttgcttgcgcctccgttcgggttttgccgcgagcgcgccgctaccgtgctgatatcgcgccgctgccgtgctgccgtcgcaccgtcgtcgttgtgctgctgccgtttctccgtcgcgccgcttgccgacctcttcgcgggaaggcaacgcgtcccgatgtgcacattttttcccagattcatacaaagctgtgccgacatgatgccccgggaaggagcttcccgattcgcgatcagggaaaacgctcttctgcgcatcggtaagcgtctcttggcttgtttttcggcctccggcatgtatgaatctgctgatttttgtgcatattgaccctctttcgccgccttcggccagcgaaaatcggcgaactcccaccgtgagcctcgttttcgtccgcttgtcttggggattgttcgataatcgaaggcctgcgtgggcttggtccgtgtacttttgctatagtgtagggtcgttggcttgatattcagaaagacagagatatgtcgctcatagttgcaaaattcggcggtacctcggttgcatcgccggagcgcatccagatggttgcgaagcgcctcatcgcaagcaggcaagccggcaacgacgtcgttgccgttgtttcggcgatgggtaagaccaccgatgaattggttggtttggccagagcgctcaacaccgatccccccgctcgcgaaatggatcggctcctgtcgaccggcgaacaggtttccatgacgcttttggccatggccatcgaagcgcgcggctaccgcgcgatgagcttcacggggcgccaggccggcattgaaaccgattgcgcccatgcgcgggcgaagatcagccggattcacgctgagcgcatcaaggaggccatcgccgaggggttcattcctgtggtggcgggttttcagggcatcgatcagaacggcgacatcaccacgctcggtcgcggcggatccgatacgacggctgtagcggttgcgtggggcatcggcgccgacgtatgcgagatctattcggacgtcgatggcgtgtacacggcggatccccgcgtggcgccgcgtgccaagaagctcgacgagatcaactacgacgacatgctcgagctttcgagtgcgggtgcgggcgtgctccagatgcgtgcggtcgagttcgcgcgcaagttcaacgtggtcattcattcccgatcggcgttttccgacacgacgggtacgttcatcaaggaggcgacaccttccatggaagaagcggtcatcacgggcatcgctcacgatacatccgaggtcaaagtgacgattcgcggggttcccgatatgtcgggcgtagcggccaaggtgttttccgcgctggcgggcaacgccgtcaacaccgatatgatcattcagaacatttcaaaggacggcattaccgacatcagcttcacctgtcctggcgccgatcttccgcgagcgaaggaaacgctcgatcggatcgtcggagaaatcgaggcgcgcgaataccttatcgacgatgacatcgcgaaggtaagccttgtcggcacgggcatgaaatcgagtcccggtgtggctgctcgggcgtttacgacgctcggcgaaaaccagatcaacatccttgcgatttcgacttctcccattcgcttgtccatggtggtcgacgccgcccaggcggcggctgccgtgcagtgcctgcatacggctttcgggctcgattccgatagcgtcttcgaggagacgcagctttcggccgaagagattgcggccaagatgcagaagggccgataagggcgcaaggcggctaagatgaaaatgaacgtgtgcaaacgagatgcgcacgtgcggaagggtgaaagatatgtcttggagtaaagcgatgccggcgaaccccgtggttgcagtcgccggcgcgaccggtgccgttggccaggagttcatgcaggtgctgcacgacctcgattttcctgcttcggaaattcgcgcgctcgcatcggcgcggtcggcgggcaagaaaatcgaatttgccggatgcggacaggttcccgcaggggagctcaccgtgcaggagatgacgcccgagtcgttcaagggcgtcgatatcgcgctgttctcgtgcggggcgggcatctcgaaggagatgcgcgaggcggtcgtggcggcgggcgctgtgatgatcgataactcgagtgcgtttcgcatggacgaggacgtgccgctcgtagtgcctgaagtgaaccctgacgatgtctcctggcactcgggcgtgatcgcgaacccgaactgctcgactatccaaatggtcgtcgcgctgaagccgctctacgacatcgctcccattaagcgcgtggtcgtttccacctaccaggcggcaagcggcggcggtgctccggcgatggaagagctttacagccaaaccaaagatttcctcaacggcgaggagttgaaggtcgaggtgttccagcatcgcatcgctttcaactgcataccccatatcgatgtgttcatggacgacgattccaccaaagaagagtggaagatggtcgtcgagacgaagaagatcatgggcgatgagagcatcgcggttgcagcgacgtgcgttcgcgtaccggtgctgcgctgccatgccgaatcggtcaacgtggaattttcgggcgaggtgagcgtcgaagcggcgcgggaggcctacgagacggccgaagggatcacggtcatggacgattgcagctccaacacctatcccatgcccggcttgcttgcgggcacgaacgacacgttcgtcgggcgtttgcgcaaagatccgacggtcgagcacgggcttgcgctttgggttgtcgccgaccagattcgcaaaggcgctgccttgaacgccgtgcagattgcgcaactgcttcttccgtagacgcgcctctgcgcatcgcaagcgataccgcgagcccgccatccggcgggctcatttgttttggcggggccttccgaagtggaagtcctcgttttcgggcgagaacaaaagaaccgagagcagaaacgctccgcatagcaaaatgagaataccgaatatcgttgcaaccatgagcggctccttcctgtgacctgcatcatagacgaggccgcataagcgaagcgttaaggtttcgcggcgaggattagaaacgcgtaaagatacgagcatgcgccgtcgtgtgcaaataatgtgcggcgaataacagaagttcgctttcgctatactgaatgcatcaaacgtacggaggaggattgatggaagaggagctcaagggcctttcttcttcggatgtcgctgcgcgcgtcgcccggggcgatgtgaacgtcgatgcgtcggtcaagacgcgttcggtcaagcagatcatcgcctccaacgtctgcacgctgttcaatgcgatcaatctcgttctcgcgtgtttcgtgcttgttaccgggtcgtacaagaacatgcttttcatgatcgtgatcgtgttgaacacggcgatcggcatcattcaagagattcgctccaagcgcacgaccgatcggttgagcatcatcgcaagcacgaaggtcgaggttgttcgtgacggcgttcgccaagagatagccgtcgacgaaatcgtgctcggcgatctcgtcgtgcttggcaggggagatcagatcccttcggattcaacggtggtgcacggcacgtgcgacgtgaacgaaagcctcctcaccggcgaaagcaagcttgtacgcaaagagcccggctcgcagcttatgagcggcagcttcgtgaacgcgggaacggtttatgcccaggtgacgcatgtgggcgccgataattacgccgcgaagatcagcgccgaggcgaaagagcacaaggctgtcaactccgaaatcatgaacagcctgaacggcatcatcaggttcgtgagcatcatcatattccccctcggtgccatactttttgcgcgcgagtacttcacgggggcctatatcgagctcaaccaggcaatcctttcgacggtggcagcccttgtgggcatgattcccgaagggctgatcctgctcacctcgacggtgcttgccgttgcggttgtgcgcctttcgaaaagcaaggtgcttgtccagcaactgtactgcatcgaaacgctggcgcgcgtcgatacgctgtgcctcgataagaccggcacgatcacgacgggaaagatggaagtcgatcgcgtggttacgctgggcgattgcggcatcgacgaggctcacgacgcgttttactcgatcgctggagccgatgaggatcccaacgaaaccgcgcaggctatcatcgattactatcaggatgtcatacccgagtccggcgccgcaagggttgggcgaaagcgcgcgaacggtcccgcgcagcccgtgaagcgccttggcatcaagcgggccatcccgttctcctccgacaagaagtggtcgggggcggtgttcgacacgggtgcgagctatgcgatgggcgcggcgcagttcgtactcggcgagaaatacgaggcggtgcgcacccaggttgaggagcttgcgcagagcgcgcgcgtcatggtgttggcccgtgtcggcgggttcgacgacgaggggaggatgctcggcgatccacagccgcttgccctcattgcgatcaaagaccagatccggccaacggccgaacagacgatcaagtacttcatcgatcagggcgtggatcttaaggtcatatcgggcgacgatccgcgcaccgtttcgggcatagcgcagatcgtcggcatcccccatgccgattcctacgtcgacgctacgacgctgctttccgacgcggcgctcgaaaacgcggcaacgtgctatcaggtgttcgggcgcgtgacgcctgaacagaagaagaaactcgtgcaatcgcttcaggcggccggccacacggtggccatgacgggcgacggcgtgaacgacgtgcttgcgctcaaagcatcggattgctcggttgcgatggccgccggttcggatgccgcccgcaacgtggcgcagcttgtgctcgtgaacaacgatttcgcctcgatgcctaaggtcgttgccgagggaaggcgggctatcaacaatttgcagcgatctgcatcgctctttttggtgaagaccgtgctgtctatggttcttgccgtgtgctttattgttttgccgtggcagtatccgttccagccgatccagatgaccctcatatcggcgttcacgatcgggctgccctcgttcgtgcttgcgctcgagccgaacaaggatcgcgtcaaagggaagttcctcgtcaacgtgatcgtgcgttcgctgccgggttccatcacggcgattctcgccgtgctcggcctcaacatcgtgtcgtatacgacgctcggcctcgattatgcgcaggtgtcgacgatgtgcgtgcttgcgaccgcatgggtgggcctgcttcttatcgtgcgtctgtcatttccgttcacgccgatcagagctgcacttatcgtcgttgtcatcggtggcgtgatcctcggcgcgacggtgttcccgacgctgttcggcatcgaaccgttcacgcaaccgatgatcgtcgcgttcgcggttgcagcgcttgcggccgtgccggtgttcaacgtgctgtatcaggccttcggctcgtggcatgcgaaaaggcaggacgagcttgtctagcggatcgatgcggcgaagccggctctttggcgccgcggtataatgctgtcatgaaaaaagtcagactggatacgctgctcgtggagcggggctatttctcggatgtcgatgcggcgttgcgtgccgtgctcgcccatgaagttaaggtggacgatgtgtacgcgacgagtgcggctgccaaggtggatcccgacgcttccgtggtcgtgaaaaaccgcaaacgatttgtctcgcgcggggggcacaagctccaaggcgcgctcgatgcgttcgggcaggatgcgagcggtttgcgctgcatcgacatcggatcgtccacagggggtttcaccgattgcctgctgcaggccggggccgaatcggttgcatgcgtcgatgtgaactacggacagcttgcctggtcgttgcgccaggatccacgggtatcggttttcgagaggacgaacatcaaactcgccgatcctgctgaggtaggggcgccgttcgacttgctggtcgccgatctgagctttatcgggttggcccagctcgcctctgtgtttgctcgattttcgcatacgggttcggtgttcatcgggttggtgaagccgcagttcgaatcgcgtccaggcgaaacggagggcggcgttgttcgagacgaggcggtgcgcgagcgcgtgatagaagaggtccgaagcgctttgcttgcagctggtttcgagtcgaccggtgtggttgaatcgcccatcaaggggcccgaaggcaatgtcgagtacctggtgcgcgcggtgtacggccgctgatcttttaggccgtgcaagcgggcggaccgacaagcggcaggcaggcaggcggcgaccgatatctgcgatgctcgaaatccgacgcctagctttcgcgggcgtcggcggccctgcgcccgagcgtccgcttcatctccgccttatctgcatacatctccctgtcgacgcgacgtagcgtttcttgcgggtcgtctcctgcgcggtgcgtcgtgagcccgtaagcgaatccgaccccgttctttttcgtttcctcgagcgcagcagggagggattcgatgacctctttctcgttttcaagagaggagagcagcatgaattcgtctccgcccgtgcggtagagctccgcgcttctgccgagggattttgcaaccgtttcggcgaagagaaccaaagcgcggtctcccgcttcatgtccttcggtatcgttgatgttcttgaaatcgttgatgtcgagcaatcccacgagcatcggtttctgcgattcgcttgccttacggaatttgaaatcgaacatctgcctgttcattatgccggtcagcgggtccttcgagaagtaattgatgctctgtagcagatagtacgccgaaaagccgattgccgaggctgcgtagttgaggaaatggaatcggaagacgatttcgagtatgacggtggttagcagtacggccatcatggaacgaagtatgcatacacgatcgttttcatgagaccccctctgagtaaagttaagtcattatagggccaagggccttcctcgtgcgtgtaaatatgatcaaacagatcaatatttatctcgagcgattgcgtgctatggccggtccgcgccgatgtgtggcgatatgccgatgaccgagacgaaaacgcttgtttcgaacagctgcgaaaaagggggacgcgagcatgctcgggcgtagcctttggcattcggttgtcgaagcgcgcggattgagcccgcgcgcttcgactagttcttcagggaattcagcggggcggggaatctgcctccgcgatgggcgaaaacggtacctgcgtactggttgacgggcatgacgggcgcatagcccaaaaggccgccgaaatcgagcctgtctccaaccgttttgccgatggctggaatgatgcgcaccgcggtggtcttgttgttgatcatgccgatggcgcactcgtcggcgatgatgccgaaaatggtttcgaccgtcgtgtcgccggggatggcgatcatgtcgagcccaaccgaacacacgcaggtcatagcttcgagcttctcaagcgaaagcgccccctgctcggcagcgcgaatcattcccgcgtcttccgagacggggatgaaggcgcccgaaaggcccccgaccgaagaagaggccataactccgcctttcttaacggcatcgttgagcatggcgagcgcggctgttgtgcccggtccgccgcaggtgcccacgccgatggcttcgaggatctcggcaaccgaatcgccttccgccggggtgggggcaagcgagaggtcgaggatgccctggctgacaccgagccgcttggacgcttcgcgcgccatgagctcgcctgcgcgagtgatcttgaacgccgtggccttgatggcttcggcgacgctcgtgatatcggcgtctttcggcatgtcggccagcacggcgcgcacgacgcccggacccgaaactcccacattgacgacggcatccgcctcgcccgatccgtgaaatgcgccggccatgaacggattgtcctcgaccgcgttgcagaatacgacgagcttgcccgctccgatgcattggcgatcggcggtagcttcggcggtagccttcacgatgccggccattttcagcacggcatccatgttgatgcccgcgcgcgtcgagccgacgttgaccgaagagcacacgttgtcggttgccgatagggcatgggggatggactccatgagcctgatgtcggcgctggaggcccccttgtgcacaagggcggaaaagccgccgacgaaatcgacaccgacctctttgccggcgcggtccattgcaacggcgatgggggtgaaatcttgagcatcggttgcggcgcagatctccgcgatcggcgtaaccgagatgcgtttgttgatgatggggatgccgtattcgcgctcgagctgttcagcggtgggtacgagcatttcggctgcgcttgtcatgcggtcgtagaccttggctgccataacgtcgatgctttcgtgcgtgcagcctctcagattcaatcccagcgtgatcgtgcggatgtcgaggtgctgattgctcaccatcgcaagggtttcgcgtatttcggctggtgtgatctgcatggggtctgtccttctcttcgcaaactatggtgttgtccgaagcactcgcgccgttcggcaacgcgctacagcatagcaaataacccgagttcggttaccgaagacgagacattatccctcaatcccccaagacctttgcgcacccgttaaacggggcgcgtgctgacttcgccgtagggaagctcaagcgtgcttttgtcgggaagttcgatgacgagtttgaaatcggaggtaatatcgatcgccttggcgcgaacgcgcgaaccgttgcgtgtgatgacgaggggctttcctagaagaaagcagcggtgtcggtattcctcgtaatacgagcgcgactcgatattttggtacagatcccaaaactcaatcagaatccgggcggcaagttcgcttcgcacggcaccttgcccatcgtctatgagggctcccgcaacgtcgatgaggtcggcggggaagccgccttggggtctcttgacgtttattccgatgccgagcacggcgtgctcgaagcgtcccgattccatatcgatggagccctcggtgaggatgcccgatacctttttgccttcgcagtagatgtcgttcacccatttgatgagcgcttgtttgccggtaacgcgctcgatggcccgagctcctgcgacggctgcggcggtcgtcaggtattgcgcttggtcggcttgcaggcgagggcgcaaaacgatgctcaggtacaatcccgtcgaagcaggcgagtaaaatgattttccagggcggccttttcccttcgtctgttcttcggcgatgatgaccgtgccttcgcgcgctccttcgagggcccgtcttcgggcttccgaattcgttgaatcaacgcgcttgcgcacggcgatatcgaaagggtgatcgcatggaagataccgtccgatgctctgaggggagagaaggtcgttttcttgggagagcgcatagcctttgttggttgcggctgtgatggtgtacccctcgcggcgcagcgactcgacggctttccataccgcattgcggctgacgccgagggatcgggcgagctttgcgcctgaaacatgctggcctaagctgtcttccagcattcggagcagtgtgtctttagtcgatgtcatgcgcccttccgatcggtatacgcatggtaggagagcgtccgtttcctgtcaacgttaccagggggtaacaggtgacaatcggaccggctcgggctatgcgcaagccggtccgatcgatgcgcgcgggcttcgatgccggggcggtttagcaacgggggctcgatgcgatcctttcaatagcgtcgaacaccgaagacagcgcggggatgtcgaccctgagcgcaatgcgcacgaatccttctcccgccgctccgaatgcgcttccggggataacggagatgcgctccctcgcgagcagctcggcggcgaatccttcgctcgtaaaaccggtctttctgatatcgagaaacaggtacaggctgccgcttgcagccgccgcatccaagcgctcgatccgcttgaccctgtcgagtgcataggccatgcgtttgccgtaaacctcatgcacgcgtccctcgatctcctttctcaaccgaagggcatgcatcgccgctcgttgcgaaacgatgggcgcggtgaacacgttgccctcgttgactttgcgcatggcggcgatgacgtcggcgggggcgacgacgtatccgattctccatccgctcatgcagtaatccttcgagaacgacttgacggtggcaacgcgcccctttgcctgctcaagctgggcgaagggaacgaagggcgacccgaagtcgtaggcggtgtagatatcgtcggcgatgagcagcagatcgtgccgcgcgcatacggcgagcaggggttccatatgcgtgcgggtcaagcacgcgccggtcggattgcagggcgtattgacgatgacggccttggtcttcggcccgatcgccggttcgaggctgtcgacatgggggatgaacccctgatcgggatcggtttcgacgatgatcggcttgccgcctacagccttgatctgatcggggtagggcgggaagaacggcgaaaagacgaccacttcgtcatcggggtcgatgatggcggaaagcagcagccacatcgcgtggcagccgcttgcggtaaccatggcctggccgttttcaatgacgatgccgtaatcgtcgcgccagaccgagcggatcgcttcgaggagttcgggatcgccgagggcgggtgcgtaatgggtgaagccgcgctttgcatccccgaaagcccctgcgatgacgcgcgggtcggtatcgagatcggggtcgccgagcgacaggtcgatcacttcgtcgagaagggccgcatcggatgcggccatcatggctttgagcccatcgcttccgagcacccgttgcgaagaaaaccgtttcatgcctgctcccggtctaatcgaggctgtcgaggaattcggaaacgagttcaaggccgcgttcgagctgcgcggtgtcggcggcgaagcagtatccgatgcgcagccatccgtccatatccatggctgagccgggaagcagaagcacgctcttctcgtcgagcagccgcttgcagaacgtttcgctatcgatgtccgcgtcgtaacgcaggaatgcggttgtgcctccctgcggttttacgtattcgatgcgcggttcggatgcgatccacgcatcgaggaccgcggcgttgtcggcgacgatcttgagattgcggcgcaaaagagcttcgcggttctcgatggccatcgttgccaggtagtcgtcgatcatgccgcaactgatcgtgttgtaatcgcgtctgtggctgatgcgctccacgagttcctgcggagcggcgacccagccgagtctgagcccggcaagcgagaaggttttcgagaacgaaccgacgctcacccccttttcgtaaaggtcggccatggcgggggcgaagttctgaccgtagggagcgtgcgtcaggccgcggtaggcttcgtcgcagagcacccaggcatcgtgttcgcgtgcgatggcgactatttcgcgcatgaacgcttcgtccatgaccgctcccgaaggattgttggggttgttgacgcagatgagatcgactccggcttctgcgaacgcgcgcatctcgtcaaggtcgggcagaaagccgttttcgggcttgagctggcagatgcttaccgttgcgcccagcgattcggggatcgagtagagctgctggtaggttggcagcacgctgatgacgcgatcccctggttcgacgagcgcgttgattacgaggtcgtttgcgccgatggctccatgggtaatggagatattggagatgtccatcgtttcgtacaggccgcagatgcccgacctgaggcgatcggatccttcgatggcgccgtaagtgagttgcatcgaccggatgtcatcccagacatcgtcgcctctgccggcgagcgccaccagttcatcgacggtaagcgatttcacgcatgtttcggcaaggttgtacgtgcagtcgttttcgtaggcgttcatccacatttcaacgccgaagtcgcggattttcatcggtatcctcctatggaacgatttggtttttcatcaggatgttcgtgcattttggggctttgcccgagccggcgggcgtggcgaatgcgggcggggctgaggccgaggaaggagtcgaggggcttcgtcgtttgaagcgggttggcgcggtgcgttccgcgtctgccgaaggcttgtttgcgcggaaggcggaaaagggaaagaagccgagagctgcttgtttccagacagggttttcccgtgtgcggaaagcggtttgggcggtgcagggagattgtcgatcggtgctgaaagaggcatgaatcgtagcggcgcgagcgccgccggttagcatacttgttctgacctcatatctgatcctttcattcgattcgtgcagacacgacccattataagccgatcgccaccgcaatgggagcccggattggaaaacgcattacctataggaagctatggaatcgaggggagctgcggggccggcgtttcttgcgaaacaggtgaacgtatgtaacagataccccgtttcggttgagaaatcgcttcctttcccctacaatacactattgaacaaagtgttgattattgatctaaatgttcattattaagatgagcaggggcaatgcgcatacggtgccgtgcagcctgcggaaggaaggtgtcatggccgaagccgcagcggcgcttgatcgcgcaacagcggaagggctggcgggaatcgaaggcaggcgggtccccgtcgcatgcacggtcgacaggcgcatcacgcgctcgaagaaggcgctgcgcgatgcgctcatcgtgcttatggaagagcgcgggttcgatggcatcaccgtgaacgacctgtgcgtccgcgccgatttgaatcggggcacgttttacaatcattaccaggataaggaagacctcctcgaaacgttcgaggacgagatcatggaagagctcgatcgctttcaggccaagatgaaggacctgagcttgaaggagatactctacttccaagttaagaagaagccccttccgttcctcgtagagctgttcgattacctgcgcgaagagggccgtttcctccatgcagtgctcgggccgggcggcgatgtcggcttcggtccccgtctgcgcgattcggtatgcggcaaccttatccagtccatcctccacgaacgctatcggaacgatccaactccgttcgtgaactactacattgcgtttttcgcatccgcctacctcggcgtgatcatgcagtggatcgaaacgggtatgcgggagagctcggaggagatggcgctcatcgcaatgaggcttcttttcatcaagccaggcgaatcgataaagctttagacaagcagtcagtatgcagctgaaggagaaaatcgtgaccaccgagtccgtacaacagggaaacgaaatcctgcacatcggcatcgatgtggggtcgaccaccgtgaagctggcgattctcgacgacaagaacgccgtccgctattccatataccgtcgtcatcatgccgacgtgcgtgcgacgatcatcgaggtgctcgaggaggcggcgcgggaatacggcgataaagccatgaccatcgccatcaccggatcgggcgggctgctgcttgcccaatggctcggcatcgagttcgtccaggaagtcatcgcaagcaagaccgcagttgaaacctttattcccaagaccgacgtggccatcgagctcggcggtgaggatgcgaagatcatctacttcgaccagggtatcgaacagcgcatgaacggtacgtgcgcaggcggtaccggcgcgttcatcgatcagatggcggcgctgctcaacaccgatgcgggcggcttgaacgagctcgctcagaaccatacgaccatctatcccatcgcgagccgctgcggcgtgtttgcgaaaaccgatgtgcagccgcttttgaatgaaggtgcccgcaaagaggacattgcggcatccatcttccaatcggtcgtgacccagaccatctcgggccttgcgtgcggccgccccatccgcggcaacgtcgcgttcctcggcggccccttgcagtacctgcccgagctgcgcaaacgtttctacgaaacgctcagcctcgatgacgagcacaccattgttcccgaaaacgcccatctgttcgttgcctgcggctgcgccctggcgggccacgaagcaaaggcggagcgccttgaggacgtggtcggaaggctgaaaaacctcggcgacatccaaggttccgaggtggtcaggcttgctccgctgtttgcgagcgaagccgattacgccgaattcaaggagcgccacagcggcgagcgcgtgcgccgcggcgagcttatggagtacgaaggggtggcgtatctcggcatcgatgcgggatcgactaccttcaaggctgcgctcatcgcggaagatggaagccttctttggacgcattatgcgagcaacaagggcgacgtgctcggatgcgcgaagtccgctctcgccgatatgtacaatgcgcttcccgtcgatgccgaaacgggcgaaccgctcgtgcgcatagggcatgcgaccgtcaccggttacggcgaggggcttttgctcgaggcgctgcgcgtcgattcgggcgaaatcgaaacggtcgcccacctgcgcggcgcccaggagatgctgcccggtgtcgagttcattctcgatatcggcggtcaggatatgaaatgcctgcgcgtcaaagacggcgtgatcgaccacatcatgctcaacgaggcgtgctcgtcgggttgcggaagcttcatcgagagctttgccacgggtctcaatctcgatgtcgcgaagttcgcaagcacggccatcgaggcggaaaaccccgtcgatcttggcagccgttgcaccgtgttcatgaacagccgcgtcaagcaggcgcagaaagagggcgcgacggttggcgacattgcagctggcttagcgatttccgtcatcaagaacgccctgttcaaggtcatcaaaattcgcgatccccacgatgtgggcgagaaggtcatcgtgcagggcggcaccttcctgaacgacgccgtgctgcgcgccttcgagcagctctccgaagtgaacgcggtgcgccccgacattgcgggcaacatgggcgcctacggtgccgccctcctcgcgcgcgatcgctacgacgaagacgttcttcgcatgggcagccgcgggaccgtggaaacatcgatgctatcgcttgtccagctcgagagcctcagcccgacccaccgcacggttcgctgcaagggctgctcgaattcatgcctgctgacggtgaacgatttcggtaaggatgaggcgactggaaaacaccgccgtttcattacgggtaaccgatgcgagaagggtgcgggaacgctcgacgagagcaagaacgtgccgaacctctacgagtacaagagcaagcggctgttcgactatgcgccgcttgcggccgaagaagcccctcgcggatcggtcggtattccgcgtgcgctcaacatgtacgagaactacccgttttggttcacgtttttcacccagctcggattccgcgtggttctttccgacccctcgaccaagaaaacctacgaggcgggcatcgaatcgatgccgtccgaaagcgtgtgctacccggccaagctttcccacggccatatcatgaacctgctcgacaagcaccccgatttcatctggtttccctgttcgaaatgggagcgccaggaagacgaaggcgccggtaaccacttcaactgcccgatcgttgcaagctatcccgaagccctgcgcctcaacgttgacgagctgcgtgattcggaaacggtgttcctgaatccgtggttgccttacgatcaaaaagagcacctcaaaaagcgcctgttcgtggagcttgtcgaagagcatcccgaactcatgggcgcaggcgttgcggctccgacgcaggccgaggtcgatgccgcagtcgatgcggcctgggccgaagacgaagccttcaagcgcgacatccgcgccaagggcaccgaaacgcttgcctggatggaggaaaccggtacgcacggcatcgtgctggccggccgtccgtaccataacgaccccgagatcaaccatgcgattcccgagcttctgaccagcttcggccttgccgtgctcacggaagattcggttgctcatctgggaacgctcgagcggccgatccgcgtggtcgaccagtggatgtaccatacgcgcctctacgcggccgcgaaggtcgccacggagcgcaaggacctcgatctcatccagctgaattcgttcgggtgcgggctcgatgcgctcacgactgaccaggtgcaggagatcctcgaagcggccggcaaggtgtacaccgtgctcaagatcgacgaggtatcgaatctcggagctgcgcgcatccgcgttcggagcctgttggccgcgctgaaggaccaggccgacgaagaggcggaatccgcagacatgaaccggggctgtccggcggcaagcgccatcctcgaatcgctttcggttacacccgaagccgcgctcgacaagaagaccggggcgaccgaagggcggatcgcttccgagctcgcgggtgcgcaggtcgttcccgatacgtttaccgagaaggccgacccccaggctgccgaagccctcaagcagcgcgagggctcgccgaccgagtttgcacgcgtgcagttcaccgaggagatgaaggagcagggctataccattctcgccccgcagatggccccgattcacttcgagcttctgatcgatatcttccacaggttcggatacaacctcgaactgcttccctcggtcgatcacggtgcggtcgatgcgggcttgaagtacgtcaacaacgacatctgctatccgtccatccttacgaccggccaggttatggaagcggtcatgagcggacgctacgacaccgacaagctggccatcatcatcacgcagaccggcggcggctgccgtgcaaccaactacatcgctctcatccgcaaggcgctcaaatcggtgggactcgaacatatcccggtcatctctctttcgttcaagaagctcgacgaagagaatccgggcttcaagatcacgccgaagatgctcttgcaggcgatctacgcgctctgctacggcgatctgctcatgatgtgcctgtaccgcacgcgtccctacgaggttgagagcggcagcgcgacgcgcctgttcgactactggatggacacgtgcaaaaagcagctggccaagggtacgacgcgcggggatttcaagcgcaccgtccgcaagatcgtcgaggatttcgatacgctgccgcttgagggcgagggcaccaagccccgtgtcggcgtggtgggcgagatcctcgtcaagttccatcctacggcgaacaatcagatcatcgacgtgatcgagcgcgagggatgcgaggctgtcgttcccggcctgatcgagttcttcctgttcggcatcgcaggcgcgatcttccagaaagatccgctcgggcgcagttcgaagggggcgttcggcagccgcatcgcgctcaaggtgctcgagaaattccgctccccggtgacgaaagcccttgagagatcgagccgattcgagcctcccgcgagcatctacgagctcgccgagtatgcaagcgagatcctttccctgtgcaactcgatgggcgagggatggcttttgacggccgaaatggtcgaactcatccgtacgggcgcgccgaacgtcgtgtgcacgcagcccttcgcgtgcctgccgaaccacgtggtgggcaaggcggttatcaaggaactgcgccgtcgctatcccgaaagcaatatcgtcgcggtcgattacgatccgggcgcttcggaggtcaaccagctcaaccgcatcaagctgatgatttcggttgcgaaggcgaacctcgctgaaaaggtgggcgaggcgaaggcgacgcgcgacgcgttcgtgaaatccgagaggccggcaccggaaagcgaagccgtgggtaacgtggaatacgaaaccgagaaggcgtaagcgctacacggaatcaagctgtctcggctaatcatccaaagtgcacctgtcggcgcatcaacgggccccacgcgttgatgcgccgatatactatgagcaaaaagcttatatttgaggtaccataagggtgatgctgttgctcggcgattttgccgaccgatcagggatggccgacgtgaagaaagctgcgagaagactcgatgtgtccgtcgattccgggtttcgcccccggtcttcgatgctgacgcggcgctctttcgcaatgctggcctgcgctgccctggcatcggggtgctttccttcgctgagcggatgctcttcgggcaagaacgtcgtcgtcgacgcccccgaagtcgaagaggctgccgtccgtctcacgtttttcggattcaagtacgaatcgctgaacgtcgtcgccatcgagggcattctgcgcgcttacatggacgcgcatgcggatgtatccatcgtttacgagggcgttaagagccgcccctatttcgacgcccttggaaagcgcctctcgtctggcttcggcgatgatgtgtttatggtcgaccatgatacggcgcttgcgttcgaggaggcgggatacctcgccgacctctcggatcttccaacgatcgacctgatgagcgatctcgctttggggcaaatgcgatccgagggcgttatcgattacgtccccacttcgatttccgcattcggtttgtactgcaacaccgacctgcttgcatcttacggaatcgatgttcccgaaacccttccccagttcgaacgggcctgcgaagcgttcgctgcggcaggggtcgttccccttgtcgccaataacgacatctcgctcaaaacggtggccatcgcctgcggtctcgcttcggtttatgcgagcgacggcgaggcggccatcgcatccttcaacgacgatccggcgttgctcgcctctgcccttcgcaaggggttcgatgttgtcgagcgcatcgtcgccaacggctgggtggatgccccgcttgcgctcgaaacggaaaaaacagccgatgacctcgagcagttcgcaacgggcgcctttccgttcatgctcaccggggcatgggccgctgctcgcatgcgcgatctggctcccgagcttgcctttgaggtgcatccctatcccgtgctcgacgatcgatcggttctcgtcgtgaatgtcgacacccgcgtgagcgtgaacgccgacagtccgcacgtggacgaggcaaaggatttcgtgtcgtttttcacgcagccggattcgatcgagagcttcgcgggcagccagtgctcgttcagtccgctgaagggcaatgcggctcccggggagccatcggtgcagccgcttgccgcggcgttctcccagggcggggcggttatcgcctcggacgacaatctgcgtttccccatttgggaaaacgcgcgccagtgcgtcgtggcgatgctgggcggcgccactgcccaagaggccgaagcgatgcttctttccctgattactgcagaaaccggcgatgcttcgtgaaactgcgcgcgtcggttaccgtgacaaccgttttcgttactctgtgcatcgtggcggggttgcttgcgtttgcggctttcgtgcacgattcgctgtgggaaaaatcggtgacggatatcctcgaggtgacgacgcaaggccaaaacgcgctcgatacgtttttcgaaaaagacctcgatacactcgatctgttcgctgacgagctggctgcgcagagctcttccgatgcagagatcatcgacgagaagatcgcgctgttcgacgggaacgatagcgaatcgacctatctgtgcgttgatcttgagacgggggaagtgcggcgaaccagcagcggcgaccatgcggtaaaaatcaccgaagagcagtttgccgagatcgaacagcatgccgagcgcggcgttcaggatccgtttctcgacgaggctaccggagtgaagtcgatcggcgtctacgagaagttcacgtttgccgacggggtgccggggctcgtgcgcaagtcaaaaccgctgcaggaagtcgccgatcggtattcgctgtcgttttttgccaaccaggggttctcgtatgttgtaaacgcggggggcgacatcgtaatacgatcggctcatcgcaacagcaaccgcacgattacgagcatttacgatatcgtgggtgaagagggcaacgatcctgaagtgatccagtcttttcgattggccctcgaacagggaaagagcggcgtggccctgtttacctaccttggggaagactacgtgttctgctatgcgccgcttgacagcaccgatggctgggacctcgtttcggttatcccgaacaacgtggtcatggaacaggcgaatacgattctcaaagcgacgttcgccctgtgcgccgccgtgctcgtcgggtccgttatcgtgcttgcgatgtactggcgcacgagcagcacccatcgcagggaaatcgagcgcatggcctatttcgacaaactgacggggctctacagcagcagcaaattcgaacttgagggtaacgcccagttgaatgcgtggcgcgagcgctcccgccgcttcgtcgcctcggccgatgcgacgggccatcgtgctgccggcggtttcgcggttgcctatctcaacatcgccgacttcaagcttatcaacgatgtcgacggctatcgccgcggcgacgaggttctttgcgaagtcgcagccattctcaaagacgtttgcggcggcgatggctttgccagccgtactgccgccgatcatttcatcatgttctgttcgtgcggcaagcccgccgacatggttgcgcgatgccgtgagatcgtcaaacgcgccgaggacataatcgctgccggaaggcccctttcgcttcatgtgggagtatgctgttcggaggattcgccggatgctgcggtgaacgagctgaccgaccgtgcgcgcatggcgaaaaccgagggtcggcaaacgggagagaacgtgtgcatgttcaacgcctccatgcgcgatgcgatgctgcggaaggccgatatcgaggccgctatggaggccgcgctggctgcgggtgagttcttcccgatgatccaaccgaagttcagcaccgatggcacgtgcgttctcggcggcgaagcgcttgtgcgatggagcaggccgggggagggcgtagtgggtccgatagagttcattcctcttttcgagcagaatggattcgttctcgagcttgacgagtacgtgttccgtgcggtttgccgcgatctgaaaacatggatcgacaaaggcaaacccgttgtccccatctccatcaacgtatcgcgactccatctgtaccaggccgatttcgtggcgaggtacatcgggatcaaggatgaatacggcatacccgacggcatagtagaactcgagtttaccgaaagcatggtgctcgaggatatggatagcgcaatcgatgtgatcgatcggttgcgcgcggcgggattcggctgctctatcgatgatttcgggtcgggagaatcgtcgctcaacgcgctgaaggatctgcccgccgacgttttgaagctcgatcgcgccttcctgttcgatcgcactgcttcagacaagggcaaggtcgtggtgaaaaccatcatcgacatggcgcagaaacttgaaatgaagacggtcatggaaggcgtcgaaacctccgagcagctctcgttcatccagaccacctcgtgcgatatggtccagggattcgttttctcgaagccgcttgcggttgaggagttttaccggctgctcgatgacggacggtagagccgacgcctttctgcgttcgtttaggctttgtcaaccgcctctttgacggcatcgccggcgtcgtggacgaccgttttcgcagctgccgacgccttcgaagccttttccttcgcatgggagacggctcgggttgcttttttctttgctccgccgattgcattcgaggcgctttcggccattgctccggcggtttctttcggcccgttgccgaagatcttcgatcccacgataaaggctgcgccgatggcggctgtaaaaatgagtacgtttttcatagtgttccttccgttgttgcttagaaccgcatggtgctgcgtgcggagatggctttcgctctgcgggcgaagagcctttggaaaaagccttgcttataagtccagaggttgacggcgaatgttctcgatacggggtcgtacatggctcctccttccagggctgcgtcggcaacggtgccgaaatcgtttatcagaccctatcagatcgtggctggccaaacggtctggcatatcgattggagatgaggtgaaagccgtctgtgaaggagccgttggctaatgcggcgagccgataccgtatcgttgccaggatgtcgggccgccgtctcaggcggacaaactgtttcctttggcctgcgccgccatgcgcgcggactgacgccgggatggcttttcttcggtggcgagtcctatgatgcggccgctgcggtagcggatggggcgttgttcggcgggctggtgcgatgggcgggctcgaacaggcaaagcggtgggggttcgaaaggcaaggcgggcgcccgtaagcgtttcgctgttcgggcgcccgtgcttctttgttgttcgtgcggcagtttcgcgtcgcgtcgccgattcggcttgcaagcggatttacgcgtcgtgctcggcgagccactcgtctttgcggtagccctcggcgttcttggtttcctcccagcttgcgggatggctgggaacgaggtcgccggtgagcgcgtggatggtggcgtagcgccctgaggtcatgcacgagccgcatgacatgttgcccatgtacagcgaccagtctccgtcgccgcacatgtcgcccgcgccgaagccgacggcgtagaggccgacgatcggattgttctccgtgtcgacgacctggtagttggcatcgaccttgatgccgcagcacatggcggtgaggcggatccactggtggattccccaaaatggcggctccacgatggggctgaggtacttcttctccttgccaaaatcggtgtcttcgcccgattcgcacagctcgttgtagcgggcgacgctctctttaaggttctcggcggggatgccgagctcttcggccagttcgtcaagtgtgtcgcaacgatgcgtatcgatgaggtcggttatgactcccgtgggattttcgacggcgccgggaacgtacttgagcagagattcgcgatctgtcggcttgtagccccattcggtagccgcctccacgtagttgttgtcgaagatgcggcagaatttgccgggatcctcggcatcttggtatcgcagcgtctcgtcccaataatgcatgggaacctgctcgttcatgaatcgctcgccgttttcgttgacggccagaaacgggatgtcgatcatcatgtaggggcccgcgtccatgtcgtgcatctgcttgctgtgcccgacgggactcatatagccgcctgccatcgccgacatgaggatgccgtcgccggtcttgttcgtctgtttgcaggtgaagcgggagaggtcgggcgcgaagcgcgagatcatcgacttgttgttctggtagtcgcccgttgcgaggatgacgcctttcgtcgcgttgaatttgatgtatttgcggtctttggtttggcctacaacgcctgcaacgcgatcgccgtccataacgagttgtacgccgggcgtgctgtagtacatgtcggcaccaagcgtttcagcgtagtcggcgagcgcgcgcacgaggtttccgttgttctcgggctttacaccgaatgcgtttttggtctgcgtgacgtagtttccgtcggcgaattcgaagtggagcgaccaggagtcgacgggcggatatccggcggccttcgactgcttcgccatccacattgaggtttcgcccgagtgataggcgaagaagcgagcgaggtccatgttcacgcggtagttgcacgattcgcgccaagcctgaagccattgcaaaacgccgacttcagttgatgcttcgaggcagatgccgccgtcgccgccgccttgcgcgatggcagtggattccttttgtaggcaggcgacggttgcgccttcttcgagtgcggtcaagacggcgggcatgcccgccgtacccgctcctacgacgacgatgtcataggttttctcttcatcgaagctcgtgatcggttcgaggatgacgctcgaatcgtcgaaatccgcctgcgtaaagccttcgggaagcgaagacgtgtccgagtcgacggtggcgttggcgctttggcttgcagcgcatcccgttaggccgaaggctgctattcctgcggctcccgcgacggcggctcccgttgtcttgagaaaactgcggcgactctggttgaattccatggtgcatcccttccttatgtacgatgacgatcggtgttgcatcttgcggcctcccacggttgggaccgcattccggtgcgcattcatcatgcgaggcgaggcgttgtcgaaccagctccagaagggggcaacgccctccccctaaaaggggtgttttgggtttgcgtacttcgaggtacgcagagaagcgggaaaaacgctacacttcgtagcagtgcaagagcaaggaggtgggtgtggcttctggtgttcgcgatccgcaagcgaaagcctctcgaagcaaaggcgggctgtggctccattggtcgtatttcgggctttggacgctttatgtgtggcggctttgggtgagcaacaacaattcgaatctgcctgacgggttcgtgtggcagggtttgttcggcgttatgtcggctgttttcatcgtggctatcgggattgttctgggttcgggccgagcgggcaaggtagctttggcggtcgggacgttggctgcgtgggcaccggggtgctgcatggccgttgcgacggtgtttgtggcgatagcgaatatggatgctgcgaatacgctgttcggtggtgcggccatggttgtgggaggcgcggggattgccgtcgcctatctgcaatggggcattttcttttctcggatagacgtaaagcgggcagtgctctatttgtttggaagtgggattatcgcgtcggttgcgaagatggcgctgttcttccttccgtccgtggcgagcactgcggcgataaccgttttgcccctcgtgtcctcgtggtgcattggacgctcgttgcgccatgttccaccatacgagcccgttcgcattcgctatagtgcgaaaaactatgcgagcctttggaaggcggtcatcgtgatcgtcgctttcagcttgacgaacgccgttcttctggcgctgctcaaaagcccggcggaaacatcttcaccgctgatattcttcgttggcagagccgtcgaggtcgtattctcgacgctcgtgcttgtatgggtgttcaaatggaacggctcgttcgatttcgtacagctttggcggttcatcctgctcgcgcttggtacggtgttgttgatgaacgtgttgcttggcgatttctactacgaagacgcccttatttcggcctcgttcaactttatcactttgttcgtctggcttacctgcgccgacatcgcccggcacagcgatttgaatccagtgctcgtgttcgctttcgggtggcttgcctatgccgtgccgttgttcggcggtgcagtcgttgttcccgctttcgccttgggccaactaggtgatttcagagtggcgtttgttctcatgtacgcgatgtcgatcgtcgtcgccgtatgtttgggcaatagggattccgatatgcgctacatcttcgccgatctcaatgcgcgtacgaccccacctgaggattttgcttcgatcgatgagcggtgcagcgcgcttgccgagcagtacgggctcagtccccgcgagcttgaaatcatgcagatgatctgcaaaggccggtcgaaagcctatattgccgaaacgctcttcatcgctgagagtaccgtcaaggggcactccaagcatttgtatgcgaaactgggcgtacacagcaagcgggagttgcaggagctggtcgaggcatagctttcgggtgctttcccttgcgttttccgtcgcaggcgatttcggggcggcgttcgtccccatgtgggcgatgctggtctcgccagcgctagccgtgtcggcccgatcgcttcgatctgcacagtttttgccagattcatacattttttagcacctggtgctgccccaaagtgcgtttggggaaacctacgatccgtttccccagttcatgggggcgagagaacgatacagggaaagcaggctgaatctgcgtgtatgaatctggcaaaaaccgtgcagattcgccgctttccgctgccgagccgctttcggtgtgcgcttgcttatcggttcggatctccgagtcgccgtcgggcgcctcgcgaggtggcgtcggtatcggcgcaacggcggaaggatgctcttctctgcggggtttgttgctcttttgctgtattgggtgttgcattgtggagtcgtacccgaaaagaaaggcggttatggctcgcgatttcagcaatcccaagaagctcggcttcatgcgttttctgcaggtggtatttcttttcaacatcctgctcaccttggcgttgtcggtgttcctcatcaagggcaactacacgctcgggttcgcagacgtgctcgattacctgaacctcatcttcgaggcgatgagcttttggctcatctggcagcgcaagcgcgcggcgcgtgtgctcatcgtttcgttttgcctgttcaacattgttatcggtacgggcgtcaacataggggcgggcacctttgacgtgctcgaccaagcgctgctttccttcttcgacatcatcctgatcgcgtacttcctcacgtcgcgccgcgcgaaggcggtgctcacggagccgttcaccgccgccgccaaaggcgaggagctcgagcgcgaaatcagctactatcagccgcgcacctgggagttttggcgcaacctcatcatgtacttctgcgtgttcagcgtcgtggggcactggatggaggcggcgtactgcacgcttattaaatacggcatcctgccgggcatctacgatcccgcctcgcagatctggtcggattggctctatccctttcccgtgtacggcgtgggtgcggtggcatgcgtgctcctgttctaccccatcaagaacgcgcttgagaagcgcatcgggagtcgcgtggccccgctgctcatcagcttcgtgatcaatgcgttcgtgtgcacgctcatcgagttggcgatgggccttgcgctcaacatggactacgcgctgtgggattaccgcgatatgctcggcaacttcatggggcaggtgtgcctgcagaacgccgtggcgttcggcatcgcggcaacgctcatgacgtgggtaatctacccggcgatggagtcgggcttgcgcaagctgccgaaggatgcggtgaacacggcgttcgcgggcattctggtgggatttgccattctcgcatttttgtatcttgcgaccttcgcgtcttccggcgtagaggtgtcttccgacggcatggataccacgttgacgctcgatctgggcggcaaggaagcggaaggctgatttggatgcggctgatcgggggatttgcggcaagcgaatcgagcgatgcaaagcgcttttcattcgcagtgggggtttgcgatcgcgtcgagacgtcggggccgaaatgaaaggccgtccgcattgaacggacggcctttcattgctatgcaaacagctcaatcgacctccggaattctatgctagccattgatcgtctggtcttttgcaagggcttcgccaacaagagttccaaaggtcaaggccctgccgtggctgataccggggcacgtgaccggatacgacattccgaaaaagtctccctgcgtgtttcctacggcaaaaagacctgggatcggggtgtcatcctcggtgcatacttgcgagttcttatcgacatgcaagccaaacggaactgtgagtgtaatggctggtacgggctgagcgtagtagggcggagtgtctacgcttgccaagaagcgagtcggtacgccgaaatcgacatcggtacccgaagcgcatagctcgttgtatcgatcgacggtggcaataagcgtttctgcgggcacatcaatcagctttgccagctcctcaagcgtatcggcagaccacatctcgccgctgcttactcccgcttcgatcctctcggcagcattgaggaggaggctgtcggcggtttgcggttcctgcgcccttgttttctcctcgtatgctccgtcgaagatgctgaaggccttgtttccgggttggttcatgcgggcattggtgacgtagggttcgtaagggacttcgcagcaataacgctccccaagcgaattcacggcaagccacgacatcgaaagagcggaaaggggaagtgtggccgcgatcggatgcaccatcggcgctgcgggtgatttcgagtgtgcggctcctgcccacatgcccatgaggatgccttcgcccaggtttccgttcgggggaaagtactggcaaacatcggcgcgctgcgcgattggcgcccagcaagcaagcatctcgtcgttgcccgatatatcccctgtagccaagatcacgcctttcgaagcgttgaattgaacgaaggttccatcttcggcttttgcgataacgccgcaaacggtatcgccttccttgacgagctgttcggcatgagtgttgaagaacgattcagcaccctgagaggtagcttcttcgagaagcgtttcgacgatatgggattcgatgaatgtgaagctctccgtatcgataaccaccccttcgtcggctcggccgaacgtgatgcccgtgcgaaactccttgaattggtcttcaagggtgtcccagtcgacttttgaggtttcggatattgcgaggatcgatggtgtgtctcgctttgcgcatagctcggaatagtgatcgaagacttctcccgatcgcgaggcccatgtgaatatgagatcgcgattcgcggttccttgggagaaattgaagagaatcttcgtggcttcttccgggctgatctcgattccctcgtcacggtggacttgcgtgttgatggcgccgttgtccgcaccgtgcgcagtgtagccagccgcttgttcgattatcgccacgctcgccccgttcgaggcggccgcttctgccgctgcgcaacccgaggggccggcaccgactatgacgatgtcgtagtctttctgctccgcgatgtcggtgatgggatcaggaattatctcccacgaatgctttcccgctgcctcctgctgcgttcctttggtctgcggcgcagcttcgccgttgctgtttcccccggaagagccgcatccggataaccccgccatgcttgcggcaactgcgcttaccgcagcgcctttaaggaaatccctccgattcaagctcatgatacaccctccttgattggtcgacgtaaaggctcttatcgccttcttcgcttctgacgatatgatcaagggttactcgcctcaagccccatcgcgggggaattgctcggaatagatcctcccccgtgcgggggaggagtgtaaacccgctggtcaaagggcttctacataatggcgcttttctcggcctcggccttaatgagctcgagcaattcctttctcgaatgaatcaggagtttctggtagaggtgctttgtatgcgttttcacggtttcttgcgacaccgtgagatcttcggctatcttcgctctgctgtcgccttttgcgataagccatccgatttcgacttcgcgtggggtaaggtcgtttcggattgcaattctttgaaggataacgagcgcgctatcggggctcggctctgctaaggggttgcgttttgcccgggtggcgttcgcgaagaaaacaagtgcgacgacgagcaagagatacaccatgccaatggatatcgaaagcaggaaggaatcgttgctgccgaaaagagacgtagcccacaggtagcctaggcttccgatggcctggccagcttggttggcaaggaggcctgaaatgaagatgtgcgttccctgcctttttcgttcggagaagtacgtgcagaaaaaccaaaccagggcaacgaagcagagaaaccctgccgtatgaatcacgaacgctatggacgaggattcgtttgcgggcaagacaagcgaaatgaaggcgcccgagattacgataacgacgatttgcagaaggagcgtcggcttgatttttccagcgaagaaagagagaaagaacaggcatgcgccggtgacaagcacggtgatgacgaaaagatggctttccgccacaggggttgcgggggcttggttcatgtctctcatgatacctgccgttacgcctatggtggcaataaagaacaagaagctgcccaaggagggctcgccttgggggctgctgaacgcatcgaagaatgatgcgtcggggtcaggggtcgtcgatgccgcttttctgtagagaagcgcggtgacaagggggagggccgaagtggcgatccatatggctgtatccactaacgcgaccgtgacgacgaggcatatgagcgaacctgctacgaatgccagtgctgtacaggtgaacgttgtctggggggatatcttgctgatgatatcggcgagacatgccatgaagatgcccgttcccatgccgagaaacactgtgcccgaaagatatgcaagatcccaaacgatgcctatgtttgcaacgcgtagcgcgattaacgcgatgccgcaggatgagagtgcgaatgcgacgatcgagagtcttttgaagtttatagcggatctggctttcagcaaaaggtagaagacgagaagagacaaggcgttgcatgttaccgctatcagccaggtgaaatcgcttgtcaaatccagatcggcagtcggattgccaattgtgaaggaaccgctccagaaaaccacgtagtggaaggcccagaaacaggtcaggcacaagatgagcacggcattttcgccaatggtttgttttgcgattcggaaagtgttcatggttctgatcgacgtgcctccagggtttcgcgagggtctgcggctgatcgggggatttgcggctagcgcgcccgcttgtccagccattcgattgcatcgcggatgacgagatcgcggtcgaactcgttgaatatttcgtggcagagccctgcgtatacgcgaagcgatttatccgtcgacgagatttcttcgaacatgtcgaggctgtcttcgggggcgacgagcccgtcgttgccgccgtgaagcaggatcaccggatctgaaaatgcggcggcgttctctttgagccagctgtgcccttgatgcacggcgcgcaaaaggccgaccgacatctctttggcgacgaacttgtcctcctgataggccttcacgaccgctgggtcggagcagacgccgtctccaagttcgttgggcaggtatgaggcgctatcgagggagtcgtcgacgagggcaaggcctttgtgatcgcgcgtccatgcgccggagagcacgtagccggaaagcttttccgggtgcgccgtgccgtagctcgccgcgccgaaacctcccatggaatggccgatcatgtaaatcggcaacccgggaaacgcccgctttgccgcttcgacgaacagatcgatgtccttgacgataacctcgcggtcggcgaagtacacgagctttcccatggatcgcccatggccgcgatggtcgaagcgaaccgtggcatagccggcggcgttgagcttggcgacgaggtagtcgtatcggccgtaatgttcgcaaagtccgtgcacgatgacgacaacggctttcggaacgctcggcgcatcgatctttccgcagagcagaacgttgtcgaaggtcgcttcggtaaattctttgttcattgccactcctgtcgggtcggtggattctcgaaggatccggtgaaaagcgcacagtgcagatgccgtctgctttcgttgggttcattctagcgtatggaagccgtggttatgcgggcggttgcagtggcaatggagtggtttttgtgccacgatatgctgatccgatgaaaggaggcggcaatggagttggaatcgtgcacggcggcatgtttgggcgacggcctgatgccgcttgcaatcggcggagtcatcgttgtcgcgcttgtcgcgcttgtgatcgcattcgtgttcatgaagcgcaaggggtaaggatacgtcatgtcgcagaccggtaagctcgtcatatgcccaacgccgctgggaaatctcggcgatatgcccgcgcgtgcgctcgacgccctgcgggaggccgataccgtatgcgccgaggacacgcgcgtaacgggcaggctccttgccgctttcgaaatttcgaagcggcttgagcgtcttgacgaacaggcgctctcgagtcaggccgagcgcatagtcgatcgcgtggcgtgcggcgaggtcattgcgtattgcagcgatgcgggcatgcccggtgtgtccgacccggggctgaggctggtccgtgccgcgcaggaggcaggcgtgccggtagaagtgcttccgggaccgaccgctgttgccaccgcctacgtggcgagtggaatcgaaagcgcccgattctacttcggcggattcttcccgcgcagggaggccgaacgaacggagctgctcgaacagctcaagccgctcgatgccgcgttgctgttctacgaaagcccgaagcggcttgcctcggcgcttgccgcgatcgctcaagcttatccagagcgagaagcggcggtttgccgcgagcttaccaaactgcatgaagaagtggtgcgcgatcggacgggagagcttgccgctcggttcgccgagcgcgagcgcgcgggcgctctcaagggcgagatcgtcatcgttgtcggcggtccttcgaagcgggaaagcgcgcttgatgcgaagcgggctctcgatgcggcacgcttgcgtgcttccgagctcaaggccgaaggcgggcatacgaagaaggacatcgccgctgccattcaggccgagttcggcataacccgcaacgatgcctatgccattgcgatcggataggccgatttgatggatgcctcgctggaagggccggtaggcaggcagtttgtacgctacgtgacgccgaacgtgctcggcatgattgccatgtcggcctatatcctggccgatacgttcttcattgcgaacggtgtggggtcagacgggctcgcggcgctcaattttgcaatcgtcgtatggactgtcatgcaggcgacgggcctcatgctcggcataggcggagcgacgaaattccaggtgttcaaatcgcaaggcgatgcagacgcggcgagccgtacgttttcaaatgcggtcatgctcgcgctgttcgctgccgccgtgtacctggttgcggtcaacctgttcgccacccctgtttcttacgcgctcggcgcggattccgatacagtgggccttaccgaaacatatctcagggttcttttcggctttgctccgttctttctgatgaacaacgtgcttttgccgtttgttcgcaacgatgggagcccccggcttgcgatgggcggcatggttttgggcagcatggccaatattgcgctcgattatcttttcatcatggtgttcgggtggggcatgttcggcgcggcgttcgccacgggcatcgccccgatactgagcatggcggtgctttctgtgcatttcctcaagcgccgcaacacgttcgagttcgtaaagacgttgcctgacgttcgtttgatgggaggcttcgctgtgctcggcgcctcatcgttcatcgtggagatcagcggaggcgtcgttctgctcatcttcaatctcatcatcctttcgttcgaaggaaatatcggcgttgccgcctacggcatcgttgcgaacatcgcattcgtggcaacggccctgttcgtgggtaccgcccaggggattcaaccccttgcttcgcatcattatgcgcagggcgatgcgcgcaacctcaaacgcgttttgcggtatgcgttgttgacggctctcgtcatatcgcttgttctgatcgcggtcgtctgggctctatccgagcccttagccgctgcgttcaaccgggatgacgatcctcgtctgacggcgctcgccgccgagggcatgcggctgtactttgcaggctatctgtttgcgggcgccaacatcgtttcggcggcgtttttcagcgcagtcgagcagccggggcgcgggctcgccatttcgatcggacgcggattcgtagctatcgtcgcattcgtgttcgcgttcgccgcgctgttcggcatggttggcgtgtggatcacattcccagcggccgaagcggcagccgcctgcctgacggcatacttccttgttcggttttcgaaagcgatggggtgtcggcatgctgggtagaaatggaagggcggatcggggcaaaggttctgcggctcatgcgcaaaggggcagacggcccgtgcgaaggggcgctggcgcaaagctcgaggttcgagagcttcaggttgacgatctttcggtggcgctgaccgtcaagcgcatcaagaacgtcaacctccgcgtgaaacccgatggaacgatttccgtatccgctccgccttgggtgggagatcgtcagattgcggcgttcgtgcgcgaaaaacgcggctggatcgaggcaagaaggcaggcggctgcggattctccccgaagccttgcagaagacgcctcccccgaagaggttgcggcgtggcgctcggttgtcgaagcggtcgtgccggcgcttatcggcaagtgggagcccgttatgggcgtgcgtgcgggaaaaatcgcatatcgcaatatgacgagccgatgggggagctgcaaccctaagacgggtcggatctgcatcaacgtacagcttgccaagtatccgcctgagtgcctggagtacgtggtcgttcacgagttgtgccatctgctcgagcggggccacgggccgcggttcaaggctttgatggactcgtttctgcccgattggcgcagcataagagcgcagctgagatcgtgaggcgcttcctcgggttgtaccgctgcgagtgcgcctcgtccgcatcttttttgaatcctgccataaggcgagcattgcggcgaagcgccaatttcgtgacgggcgggcaaccgaacggttggcagcgggaatgcctgttcataatgatgatatgaaacgtgctgccgaaacatcccgtcaagccgcagaagcgcaaaccgatcttgccgaaggcgaggtttctgacgtgcgttttgacgatgcccccatcgaagcgggaatgccgaaacgcaagcggatgatcgttctcggcgtcatgataacgggcaccttcatcgcttctctttcgcaaagcatgctcattgccgcgctgccgaccatcatggagcagttcggcgtcgatgcgacgctcgggcagctgcttacgacgtcctatatcttcactcttggcttgatatcggctatgacggctgcccttatcggcaaattcaacaccaagtacctgtttatcgctgctatggcctgcttcgttatcggatgcgcggcagccttattcgcgccgaactactggcttcttctcggcgcgcgccttctgcaggccgggggagcgggcgtggcccttcctcttgtgcaggtggttgcgttatcggtgtatccgaaggagcaatacgggcgggccatggggcttgtcggcctcatcatcgggttcgcccccgccatcggcccgacggtttcgggcttcatgatcgatttctggggatggaagtcgatctttctgatcctgggttctatcgttgccttcatcacgatggcttcggcctttgttctcaccgatgcggcggagcacgagcgcgaacggttcgacgggctttcggccgtactgtacacggttggattcgtgtctttcatgatcggcgtaacggcggccgaatcgctggagctgggcgatgtgcgcgcatacgtttttcccgtcatcggaaccgtggttctgtttgcatttgcgcgcaggcagtttaagatcgagaacccgctgctgaagctgcgatgtctgaaaaacaggcaattcggcatcgcgactgtgctcgtcgtggttacgcagatcgcgcttatggtgggagccattatggttccactgttcgtgcaggacattcaagggaaaagcgccatggaatcgggcctgacgattcttcccggcgccctgcttctcggttttctgaacccgcttaccgggcgcctgctcgacaaatacgggccccgtccgctcatcgctgcgggatgtgcgcttcttatcatcggcacgctcgtgttcgtgaaactggggacgggggctcccgcctggatcgtgacggtatcgtacggcatccgcatcgtaggcgttgcctgtctcatgatgccgatgacggcgcatggatgcgcggctcttcccgccgacgatcttgcccagggcacggccatcatgacatcgtttcggcaggtgttcggggcgatcggcagctctattctcgttgccgtcatgacgggaaacgccgaaaccgctaccggtatcgatctctccggtttcggggtgagcttcgaggtgcaggccgctgtcgtgttcgcaggactcgtcatcgggcttgctttcattcctcggaaagataaaactggtgtaagacacgtttgaggaaagcgagcgatgcgggaagcgatagacggagcttggtggaaaacatggccttgggggcgtggtgcgacgttgcggaagagtcgatcgagagagatctcgagcgggctcgcgccctggcctgccgcttcaacagcgaacagggccttacaaccgagcagcgaactcggccgctagatcatttccatctgggcgagggtggtgttgtaccaatgctcccaattgggcgggcagtattttttggccgactcgaccgagatcgtgtatccgtagccgcgtgcgaggccgcgcacgtgagcatcgattgcttcttcccagcttgaccagcttacgctgccccagccccatgcgttgtacgggtaagcgcaatgcgcgcccttcgagctttcggtgagtgagatggcaggagaccagcgagggtcgacgccgtagttccacgcggcttcggcgaaggttttcccctgtcccgccaaaggcgatcccgccagatacgcgtcgatgcggggcgtccattcgcttacgaacgcctgcttgtcggtcgaccagtcaacgtcgttgctcggaggatcggcaacttcactgccgccgcttggcgattcgggttgctgtcccgaggcgctgttcgcggcttcgtcggccttttcctgctcgatttcggcagcctttgccgcttcttcggctgccttctgctcggccgccgccgcttcagctgctttcttctgagcttcttcgcgcgcttcctgcgcaaccttcagagcgtcttcggcgcgaatcttttccgtttccgcatcctggcgtttttcctcaagcgctttttcagtttcttcgagttcgttttgcatattcgcgagctggttgatctcgttcacgttcttcgtgtagatgcgatcgatgtactcgtaggtggtaaggaagtcttcaagcgtgcccacgttaagcagcatatcgatcagcgaatagccctcgttctgcaaattgtagagggctttcatggcgtcgccgctcttctcttgctggccggggagcgaggcggcgagctcgtcgattcgggctcgggtgtcttcgatttgccgctcgaccgattcgaggttggcgacggcttcattgtaatcgagggcggtttgctcgaccttttgctgcagctcatcgggctcggcgtcgatttcggtggtttcggctttggctgtgaggggggcggcaagagagaacgctaagacgcatgcgacgatgcaggcgaaagccttgcgggcgtcgaacgttggcgtagtgcgtttgttaagtaaggtagccatacgaatctcaaagtatacctgacgtcgttttgcagggcctcacccgtcatgaaaggcacataagcacggttgcttgcgaaggaagctgcggaggaccttgtttctccgaagaaagagaaagcccatcgatcggctttgacggctatcgaccataggggataaaccctacatttaccctgggaaaagggctatatcggacggccgtggtatcattttcgcgaggagacgccgcagatggcgtgctcgtgtcggcatttgcgccgagggcgcgccgccttggtgcgaggggagacgagatgaaaaaggcgcagctgccgcttcaaacattagatctgatcgcagggttcatggtttgggtgatcctgtcgtcgcttctgccgttcatcagtcatgacatatacattcccgacgatatgctcgccctcgtaactgcagtgcctgtgatactcggctccgttttgcgcattccattcgggtattacgccaatcttctcggtgcacgcgcggtgttccttgcgagctttatcgcgctcctgttccccgttttcttcttgagcgaggcaacgacatacatcgacctgcttatcgggggagtgtttctcggtttcggcggggcgatcttctcggttggcgtcacatcgcttccaaagtactatccgaaagaacgccacggtttcgtgaacggagtctacggattcgggaacatgggcacggcggtcaccacttatcttgcgccggtgctcgccgttcggttcggatggcagattgctgtgaaattctatctgggtcttttgcttgcgatgatcgccctgaacttctttttgggcgatcgcagcgagcctaaagtgaagacgcccatcgttcagcaaatcaagcaggtgtggaaagacgagaagctttggttcttctcgctgttctacttcgtcacgtttggggcgttcgttgcgctcacggtgttcttgcccaacttcctcgtgtcgacctacgggatcgacggcgtgacggcgggtgttctgacatcggcgttcatcgtcgttgcggcatgcgtgcgcgtgcttggcggttggctttccgatcggctgaactgctggaggcttcttgcgggggtgtttgccggcatggccgcaggcgcactcgtgcttgccgcgatgccgggcctcgaactgttcatggcgggcgtgtacattatcagcatcgcctgcggcatcggcaacggcgtggtgttcaagctcgtgccgacgtatttcatcggtcaggcggggcccgtcaacggcatcgtgtcgatgatgggcggactgggcggctttttcccgccgctggtgcttgcggcttttcttagagctacagggtcctgctcgctcgggttcgttgcgtttgcgagttccgtcctcgtatgtttggcggcggctgcttggctcggcaggtccgagtcgcgaaaacaccgtggtgcctccgccgaatagcgggcgttgcggctgtgccgtgctagaatagcgggcacgcacccatacgcacaggcgcgcgatgtcatcggtcgcgagagccgaatgagaggaacaccatgtcaaaaggaacctattcgtttaccacgcccatctactacgtgaacgccgctccgcatctcggcacggcctacacaaccgttgcggccgataccgtggcgcgctatcagcgcatgaacggctacgacgttgcattcgttaccggtctcgacgagcacgggcagaaggttgccgaggttgccgggaaaaacggcatgacgcctcttgagtggtgcgactccatggagccgaagttccgcgatgcgtgggatatgctcgatatcacctacaccgatttcgtgcggacaaccgagccgcgtcatgcccgtaccgtgcagaaattctggaccgacctctacgagaaaggctttctgtacaagggcgcctacgagggttggtactgcgtgcacgaagaaacctactacgccgaaagcgacctcgagaagaacgaggagggcgtgttcgtgtgccccgactgcaagcgccccgtgcagcaggcatcgggtgaggagaactggtttttcaggctctccgaattcgaggacaagctgctcgctttctatgaggaaaaccccgatttcattcgtcccgaaacgcgcaggaacgaaatcgtctcgttcgtgaagagcgggctgaaggatctctcgatctctcgatccacgttcgattggggcgtgccgctgccgttcgatcaggggcatgtggcctatgtgtgggccgacgcgcttttggcctacatcaccggcatcggatacgccgatccggagcgcgaaggcgagttcgacgcgcgctggcccatgcagtaccacttcgtcggcaaggacatcatccgtttccattgcgtgatctggcccgccatgctcatggcggcgggactgcccatcacccatacggtgttcgggcacggcttccttctgaccaagggcgagaagatgtcgaaatcaaagggcaacgtgcttttgcccgaagacctcgtgaaggttttcggcgtcgatgcctatcgttactatttcatgagcgatgtgcagttcggtcacgatggttcgatttcggtagagcgcatggtgcaggtgtacaacgccgatctcgccaacacgtggggcaacctgtgctcgcgcgtgttcaacatgaccaagaagtacttcgatgcgaaggtgcccgaggcgcccgcttcggctgccgagaacccgctgagggagatatccgacaagctgtacgacgaatacgatgcctgcatgagcctcgtggacttttcgggtgcggccgcggcggtgcagaaacttgcaagtcgcgtgaacctctacgttgaggaatccgcgccgtggaacctagcgaaaagcgaagagaccgcaggcgagctcgctgcggtcatctacaatgcgctcgaagccattcgcatcatcgccctgtacatggcgccgttcatgccccatacctcagccgaggtctacaagcgcctttcgcttggcgacgtgacggcggtcgaggatatcgaggcggcaacttcttggggccagcttccggcgggaaacgacgttgagacaggggatccgctctttccgcgcctcgatgtcgaggcgatcgacttcggcgtcgaatagggcgttaggttgtttgggccgcgcaacggacgatacgggtttcgggtgcgatgagatgacgaggatcgatgcaatgactgaaaaagccgaacaagccgaaacgccaacaggcgaaacggagtccgaagaacccgttttcttcgatactctgttccgccaaaagcgaaagcacgggaaatatcgtgtggtagacgtgcctgcaacgggggccccgatagcggacacccacgcccatctgcagctattaagcgaccctgcgctcgcgcttgcgcgcgcaggcatgcgcgacgttcggttcctctgcacgatagtcgatgtgtccgaagacgggtcgaccacgttcgacaagttcgatgaatggaagtttcaaggtgcgcttaacatcaggcggcttcttacgcgacggtgttgagggcagcccattccgtgcgtgccacggattcgaattgcagttgggtgccatccgcataacgcaaaagattacgatgagtcgcttgaagccgagctgttgcgtcgcttggccgatccgcgtgtggctgcgctcggcgaggttgggctcgattaccactacgatttctcgccgcgcccggtacagatcgaggtgtttcgccggcagatcgaaattgcccacgaaacggggcttcccctcgcgcttcatcttcgcgaagcgcatgaggaggcgtttcagatcatgaacgaagagggatttcccgaggccggtgttctgcttcattgcttcaacctcgattgggacacgcttaagccgtggctcgacaagggctgctatgcggcgttcggcggttcgctcacgttcaaaaagagcgatgacacgcgtgaagctgcgcggcgaatgccgctcgatcgcattcttaccgaaacggatgcgccgtacatgactcccgagcccatgcgcggcatggaatgcgggcccgaccatgtgatatttacggcggcgcggcttgccgaggttctcggctgcgctcccgggccggagcaaatcgatacgctgtacaaggtttacgataacgctttgtcgctgctcgatcgcgagccgacagcgtggcagcgcgagcatggcgaggttgcgcgatgaaccgccttgtagtgtgcggctccgttcgccccgaaggaaaaagcgctttgctttcggcggcgctgatcgagcggatgcacgagctgtggcccgaagatgagctcaacctgttcagccttgccgaggatatcgatgtcgatccatgtttggcctgcgatttctgcaagcttggcgaggggtgcatcatcgatgatccgatgcaggatctctacgggatgctcgatggcgccgacagcttggcggtggtttcaccgatttacttcgcaggtccgccagcgcggttcaaggcggtgctcgatcgtttccaattgtatttctggactgattttcgccaggcgaaaaaacgacctgccgagctgttcgccattggcgatgggggagacccccatggatacgagccgctggtcggcatcctgagatcggcgcttgcggttgcgggattcaggctcgatgcggtgcatgattgcgtcggaagatcgttcgacgaccttcgcgccgttgccgattcgtgggcgcctgtgcaaaaggggagcgaatgacgaagctctcgccgctcgcttctccttcggccacccgtgccgttttggaatcccacgggcttgccaccaagaaggccctcggacagaactttctcgttaacgatgcgatcctcgccaagatcatcgatttggcggatgtggccgaaagcgatttcgtgctcgaagtgggacccggaatcggcacgttgacgatcgcccttctcaagcatgcagggcatgtgatctcggtcgaacgcgacaaggatttgcctcaagtgctcgaagagacgcttgcttcatgggcggatcggttcgcccttatcggaaaagatgcgttgggcctgacgagtgcggacttggctgttgcggcagagcagctcggcatcattcggggggatgatgaacgatcgcttcccaacaagttcgtcgcaaatctgccctatgcggttgccgcaacgctcgtgctcgattacttcgaacggttcgaaagccttgagagcgcaacggttatgattcaggccgaggttgccgatcgcatggctgcgaagatcggaacgaaaaactacggttcctataccgttaagctgtcgatgttcgctgagcctgcagggcggttttcggtgagtcccggcaatttcttccctccgccgcgcgttgaaagctcggtgttgcgcctcaatcgcagaatccccgttgacgattcgggggcgcccctcgattccgatacggtaaaggctgcatgcgttatggccgacgccgcatttgcgagcaggcgcaagacgattgcgaactcatgcaagacgtactttgcgggcaggggcgaggcgggtgcacgcgcgatagaggcactgcccgccttgctcgcgcgtgcgggcatcgattccgggcgtcgcggagaatccctttcccatgccgagttcgtgcgcctcggaacggagttcgctcgcctctaggcgtcctctttggcatctatggccgcacttcggcgacgttcgccgaagcgctagagcggctggttgctgcattggctgagagctttgaagccgagcactgcgatgagggcaatgcggggtatggcatagcgaaaggggttgccgcgtgaatggcggccgagaggagagagcatgtccataggattagctgtttgcttggtgtgcgggaattcgctcgattatttcgaggaggcgcaggaagtcacgtgccacatctgcggaaagaaagagacggggcattccgtttgttcttcggggcactacgtatgcgatgagtgccatcgcgcgggcggcgtcgagcagacgatgtcgtactgccgcgcatccgattcgaaagaccctatcgggatagccatgaaaatcatggacgacaaatccatttttccaaacggcccggagcatcataccctggtgggagctgcgttgctaactgcgtatagcaacgccgggggagaaatcgatcttgaccgcgcgctcgaagagcttcgtgcgcgaagcttgaacgtccctgggggaacctgtggtttttggggcacctgtggcgcggcggtgagcgcgggcatgtatatgagcatcgtgagcggctcgactccgatgtcgcgcgaaccgtgggcgcagaccatgcgattgacggcgcgcattctcgatcgccttgccgacctcggggggccgcgatgctgcaagcgcacgtcgtttacggccatcaaaacggctgtcgaatacacggatgaagtatgcggagtgagcatggagctgcctgaaaagatcgtatgcacgcacttcgcgcgcaacagggagtgcttgcgggccgattgcccgtatttcccgggtcgtcagagcgggaaatagcggttcgaagagcgcgaaccacggcagatgctgcggtagatatcgagctgcagcaggggtttcggcagattgtctgcatattatcaataaaatgtcatcgaaacatgcagattctgttaagcattgactcccatggtataatcccatgctgttatttctgtaatatgagtcacatgtgaggaatgagtgagcatggatttagctaagcaggcgaaaatcgtggatggaatccacgatacgttgcatgatttcgtcggccagcggctgaaggtgcgcgccaatatgggtcgttccaagatcgtcgagagcgaaggcgttttgacgcaagtgcatccccagctgttcatcctggaagttgatcgcaagcgcggtcgtaccgctcgtcagtcgtatcagtacgtcgacgtgttgaccggtatggtcgagctttcgcaggatggcgagccgctgttcgagccctttatcgaggaaacccctatcgacgaggcgccgatggtgctcgaagaggacgccgaggaaaaagagacggttctttcgtagagccagtccgaaaacaatcatgttcaacaaaggcgtccgtcatcgacgggcgccttttgcgctcaaggctcttgcaggcaagctcttccgtgcgtgttcagggaaaaatgtcgcatgggcttcgatgcggcaagcaccgaacgaccgccaatctgcacaattttggccagattcatacaagctcgcgtctgtattgttggcattcgaaatctagaaaagcggtatcgcctcaatgagcagggaagatgatgccatgcgcttcggggcagggtcgcgcgaaggcgatttctgctgctcgagatgcttttgcttgtatgaatctggccaaaactgtgcaaaatgatggcagagctcttctcgacggcgggtatgcacctcgctttttcgaagcgaggcgagagctggaagctcttttccgaagaaagcgtgatttcatttgacaaacaggcgcgttgcggggaaaatactttctcgcgcaatgcgcactttcgtggggatgtagctcagctgggagagcatcacgttcgcaacgtgggggtcgtgggttcgaatcccatcatctccaccacgaaactacacgggtcgggtgcaatcccgacccgttttacgttcaggactccttcgtgaacaaatcaaggtaatctttgtatacccacttctttgcataggagctcgatcctgtttccattggcgtaaggatgtccatgttgacaaggcggtctattgccttgtaaccgccaggtgcggtgaagcctgtccattccgttatatccgctatgcctacgattggcatggaaaaaagctgcatgagtattttcaaagtgctttcggccgctgtttttccgagcgcctgtacttttcgcagatccctttctcgaagctcggtgatgtctacgcatgtttttatggatgagagagcggtctcgatgattccttcaaggaagaaatcgagccattcgaagacttttccctggtggtagccatccaatcgctcgtagtagagctgttgatgctgcttaaaaaacgaagacaggtacagtaccggtgattcgagaagcctctgtgaccaaagatacatggttatgagcattcgccccgttcttccattgccatcagcaaaggggtgaatggtttcgaattgggcatggagaagccctgctttgaccaaggcgggatatcggtcattttcgtgtacgaaacgctcaagatcgcccaaggctagcatcatgtcatcgacaggtgggggaacgaagcgtgcgttgtctggtctcgttccgcctatccagttttgagacgtcctaaattcccctgggtaggaaaactgcgtttcccttgcacccttcatcagcagcttgtgtagctcgcagattaatctgagggaaaaggggaagtcttccgctcgcttcaacccgtaattgagcgcagtaatgtaatggatgatgtcgtcgacgtccgaagggaggctgtttcgcggctccgcgttgccggcttcgatgacgtctgcgatagttgcgcgcgttccctctatctggcttgagcttgcagcgtctttttgaacgaacatgagaagaaacgtgtcacgatcgggcagcagttgcgtcactccgtcgagcttcccaaggagccgaaccgcttctgtatgctttgccataagctccttcggcatggggaaatcttttgatgggggaaattttgagggaatgaacgctttgtatcctttgggttgttgaatgaatagaccaatttcgaaactgttcatattgcatctcccaacataaactaaattttagttttagtttatattaacacgctaaacataaactgttttgacggatcggattgtttcatttggttgcagctacgctttggagctgtctattgcgcctgcggcggtcgctggctcgttgcttgctgtcacggtatcatggctgcggcaaagcggctgaatggcgagtatcgccttcttggcgctttcgttagggctttagcccgtcgagcacgcgaagcgtgggagatgcaaaccacccgctatgcgggtgtgcgacagatgctatgcaaaatcatcttcctttaaaatggcgattgttcaggtcgtctattcgtcttaaggaaggtgattcgatttttcgatccattttgagcaagatttgccgtaaacagctcagcagcctatttggtagtaattaactttcggccctgaagtcgcttttcggatcggcgttgcgggcttttgcgcatgcgttcggcatcgaccaagacgcctatgcggatatgagtttatgaaggtccgcaaatatgaaatcaagagaaaccatgcccccgagacggggcttaggcggatcgtcgatcatccaggcgtcggcttgcctgttgtcagacggcggacagaagccggtaaagccgcatgccgtcctgttcggccacgagctcgaagccgggcgtgctctcgtcgatcctgctatccgggcccgctggggcgtagtcgatctggtcgagctcgttgaagcgcgtcgtcatgctctcggcatcgctcatctgcaccacgtaggcgagatcgagccgtgcggccgccgcgcgcacttcggcggcatcggacccttcttccctgtattcggcgatggctcgggagaagtctgcctgggcggagaaaagaagctgcgacttgtccaggttcgcggctgcgaacgatgctctgcttcgcagttccgcacgcatctttgggtgcatcccggagatcggtgctgcttccagggcgggaaaagccgggagggcttcttgcatgcttgcgcggacgatcctgttcaagcgcatctgcctgtggtctaatgagaggactattgggcaaactgaggattatcgggagtgtcgaacgtggataagaaagactgcatcgcgccctgcgggttggactgcttcaactgcagctggttcgaagcgaatctgactgatgagttcaagcggaaagaggccgagcggctctccctttcgtttgacgaggtcggctgcaagggctgtaggggcgagcaagggaaatgctattgggcgcaaggagattgcgcaacgtggtcgtgcgtcgaaggaaggggcgtcgcctattgtttcgagtgcgatgaattcccttgcggtttgttggctcctacggaaaagggatccgattatccccacaacatgaagatctacaatctgtgccgaatgaagacccgtggcatagaggcctggatcgaagagtcggctctcatccgcgaacgctattacgaaggcgatttcatcgtgggccgcggccccgttctcgaaggcgaatagcgaacggcgcaggcaaaaggagccggtcttgccgaaagtctagatcgacgagacggcgtaggcggcaggcatcttttcgcttgcgtgcaaaccttcgctctggctcgctttcctatcctttcgttcggttcgccgctcgaagctcgtctgcccgtgcgtcgacgatgctcatgagttcttgctgtgcatgcacgtcgagcttgcgatagatattgcgtaggtgcgatttggccgtgtccctcgatatcacgagctgctcctgcacgaacccgaggtttctcccgtgcgcaagcagcatgaagacttcggtttcccgaggcgtaagcttcgcttcggttgccacttcgtcgcatgctagcctgaatgcgccttttgagaaggatgtggcggcgggctttgcgtcgcccagatcttcccagatagggttgcctttgatgaggatcagcccgcacatcatgagcacgaaaaccgccagcatgcacatgtcggttccgtttacgccgagcgcgtttgcgcccatgccggaaaggtagccgacggcttggcctgccaaaagcaggaatccgacggcagagaagaacaccgcttcttgcgggcgtcggtcggaaacaaggtgcgagcaaagcgtttggacgatggcgaatacatagaagtatccagcggtgtagaggatttcgccgatgacgaacagatcgcctgtcatctgcgtgccgttttggatgatgcctccattaaaggaaatgacgatgaaggcgagcgccataaacgggatgcctatctggtagatgagccgccgataattcagatgcaggaagtatgcggtaagaagcagaagggcgagtgccagcaaaaacccgagaatgctgctgaacccaacaaagtcgaggaaccccagggtactgaaaacgtttgccatctcgcgccagatgcagaattgtgcagagcatttgacgatggtcaccgattgaaagatgaaatgccacaatccgattgcggcaccttgaaggaataccgtgcacaaaagacgccagggcatagcccgaaacgccccttctccccctgcctttccatgagcgtcctttgcgtcggcgtcttgcgcggcgaggttccgggtgtcggaattcccggcaccctcttcctctcggcctcgcggacgctttttcgtgctcttgcttccaagcgtttttccttcttctgatcttcggggaagcgtaagcagaagtgcggcgcttccgagcggaacaagggcaagcagcatatcctgcttgctcgcatcgagcaggaatatgacgatagcgccaagcgaagcggccgcaagcgcaagcgaggcgatcctgatgacccgtctcgaatcgtactgggcgatacgggggctccacgaagcgaagagcagagcggcaagcgcccccgaacagatgcttgcgatcggttgcatgaaagcagacgggatgttcggaataaacgaggcgattgttgcaatggcgaaagccgctgtggcggtttgcgtgatcacgttgatgcgtccgcgcagcagccatgcgatcgcgaaggttgcgagcgctgcagcgacgatggtgctgcggtcgtctaacaagacggcggagccgagtgtgcccatggttgcgcccaggggtttgacgaagaggaaccaaagccaattccagaacaagccgtaaccgagccacaaaggccaatcgttcagaagcccgccaaacgggcctgcgtttcgtttttccttcattcccgtatccccccttgtgcccagtatacgacatacgggggcggagaggtccaccagaggtgtggaaaacgcgtctcacaccgctggtgtgatgtgcaaatatcgggctcccgtaacgtgtgcgctgtccgatcaatcagatagggtggaaggggaaagcatggaactgacaagacgacaattcgctgcgctcgcatcgtcggcggcaggtgttgcggcactcggtatggctggatgcagcccgaacaaagacagcgggaagcccgaggaggcagatgcccacgagccttacgtatcgcccatgaccgacggcgagatcaccaaggttcgcacggcatgcggcaactgccataacaactgcggtatgatcgccaacgtgagggatggcgtgatcatctcgctcgagggcgatcccgagcatccgcacggcaagggttctctgtgcccgaaggggcaggcgtttctcgacgtggtctacgcgcccgatcgcgtgaccaagccgctcaagcgtgcgggggagcgcggtgagggcaaatgggaagagatggaatgggatgaggctctcgactacattgccgaaaagctcactgaaatcagggacacgtacggtcccgagtacctttgctacagcaacggcgcgcccgtgcagaacatcgtgcgcaacgcatactgggaattctatgcgcgctacggcacgcccaaccaggctgccgtacccaacctgtgcttcgtgccgcgtttggtggcgctgaacaccacgtacgggttccgcaacgaggatgactacaacaacgccgatctcatcatcttgtggggcgccaacccgttcgcatcgatgcgcccgagctcgtttatgtgctacgagaaaaagggctgcctctcgtcgctcatcgacgcgatggagcgcggtgtcgacctcgtggcgatcgacccggtgtgttccgagacggcgaacaaagcgaccacgtggattcccattcgtcccggcaccgacggcgcaatggcgcttgccatgattcacatcgttatcaaggaagacctctacgaccatgatttcgtggagaagtggtgccagggattcgacgagctgtcctcgttcatcgagcagtactcacccgagtgggctgaaggagagaccggcgttcccgcgcagaccatcgccgatcttgcccgcacgtacgccaccacgccgcgggcgaccatccacgatggaaacaacttcgcgctgcaaacgaattgcgtgcaggcgacgcgggccatcgcgattctggagtcgatcaccggccatatcgacgtggagggcggcaactgctgcttccccgatgtcatcggcaatccgaaagccgtggagatgggcaactcggcaggcatcaagaccacggtcgccgtcgacaaacctccgctggcggccacgtacaatcccatgctcgcagcgggcatgcccgcaacgcttcgtgcgatcgagaccggcgagccctacgtgccgaaggcgatgatgatgtaccacaccaacggtgcgatcacgcaggcgcaaccccagcggacgatcgagcttctgcgcaatctggacttcatcgtggtgaacgatctgttcattacccagacggcgctgcagttggcagacgtgttcattcccgattgcacgtttctcgagcgctacgactatcgtacgtatccgtcggccgagggtacggtggtgacgcttcgccagcaggcgatcgagccgcgcgacggcatcatgaacacctacgacttcgagtacgcgctcgccgagcgcatgggattcgccgaaggatacccatggacgaaccaagaggagttcatcacgtacgcgctcactccctcgggactcacattcgaagacctcaaggctaatccgacgcagatcgtcggcaagcacgaatatcgcaagtacgaaacgggtggacttcgtcctgacggcgaacctggcttcaacacgcctgacgggaaggtcgatctggtcgatctcgcgttcaagaagaacggttacgatccgctgcccgcctacgtgcccccggcggcatcggcttccacgaagcccgaggtggcggcagcttacccgctgatcggcatcaacaggcgcatcgtgtactacgctcacttcaaataccgcaacaacccgtacctgcgcgagaaccggcccgatcccgtagtgctcatgaaccccgtcgacgcgaaggatcgctcgcttgccgatggcgaatggatcaagctcacctcccttttcggcgaggcgaagtttctgcttaacgtctcggagcgcgtcatggctggcgtgctgtgggtcgacggcggctggggagatccgtgggcctacgaagacagcaacttgaacgcgcttgtcgacggcacggagctcgatcccgtatcgcaatcgccttcgcttcactcgtttttcgttgaagcaagcaaggcataggactcgcaggaagaggaaaggaatcagcgatgagccattatggaatgacgatagacctcgaccgttgcgtgggatgcagggcgtgctcggtcgggtgcacgatgcataacgggcttccgaaaaacgtgaggttcagctatgtgaacgagcaggagtcgggaacgtttcccgatgtgaaggtggattatttgccgcatgcgtgcatgcagtgcatcgatccgatctgcatgtcggtctgtccgacgggggcaacctaccagaccgaagaaggggtcgtgcttatcgaccaggaggtctgcatcggatgcgaaagctgcgtgaccgcatgcccctacggtgctcgcaagctcatggttgaggtcgaacccaatcacgatgaaggcatgacggcctatgaagaggcggtgttttcgtaccacaaggcgaacaccacagggaaatgcaccttctgttacgaccgcgtggcgcagggcgaactgccggtttgcgtggccacctgcccggcccacgctcgccgtttcggcgatctcgacgatcctgaatcggatgtggcgaaggtccttgccgacggcaacgcccatacgatcttcgaaggccagaacatgcagacatccgtttactatatatacgaaggcgacctcgatatcgacgctatgttgggggcgggaaagtaagctcgcccgattgcatcgggccgggttgccggtaaagaaaagctctgtccaagtaaagcaaggccctgtcggaacggcgaaaagtcgtttcggcggggcggctgtggtttttgccacctttgtgatgacaaatctcgaagaatgtatataatctcttccataattatagaacctcttatataaatcaaggggctcgaggatgaggagagagtatgatcgggaatgcccagtcttcgcgggggacgaggaaactgttcgccctgttcgtggcaatttgcctgctgctatcgctgatacccgtgtccggcttcgggtttgccgaaagcatggatgcgtccgccgcttccggttctgccgagtcggtcccggccgacggcgaaacacagagtgattcgccgaagggtgacgacgtcgctgcgaccgacgaaaacgcagagcggtccggcgatgatgatgcggcaagcgatggggcgggtccatcggacaaagcggccatggcggcgcccgagtccgaaagtgcggcggcgagcgatggcggcatcggccttctggcaagcgagatagcctacctgaccggttcggtaaccacgactcccgtcgatccgctttcgggtgcgagctttaagatggtcatcgagctgaacagcaacagcgctggcggctcgacgaccgagggactgcgcggcacgaaggtatctttcaagattcccgccaacgtcgaaatccaatcgcttccaacgaccaacgggcagtatacggtcgagcccgcaaatccgcagccaggtgatacggtgaccgtctcgtacaaaaacgagatctctgtcggctcgctgcaaaagctcgagtgctggttccgcttcccggcgggcgtgagtcttcccagcgagtcgttccagcccgagatcaagctcgaggcatcgaacgcgtactcccataccatgacgtccgacgaggtgaatccgaccaacctgcctcttggaaccgtcatgcaggtgatacctcaagacatcaacccgatctttcttcatacggcggaaatcgatctgatacgcgaggcatacttgggcggcctcaaccaaaacgacgcgtcggtgaaaatcgagttcccaggcgatgcggaagttctttccgtcgtgtacaaaggggtcgagtacgcggtggtcgacgatggggtgggcggcaaggtggcaaccgtgcccataggaacgcttaacgtgggcaaccaggcaaccaaagagaagatcaccgttttgtacagctacccgccgatgacctcgccgggtaccaccgattacgagatcaaggccacctacacggcaacgcggttcaacggaacccctattgcggaaacgggcttcatcaacgagacggtatcccatcaaaacggcggctccgatgccaatgccttcttcatgaagcacgcaacttaccaggtgtttagaacgggaggccaggcgcttacgttcgaactcgactacacgccctatgccgacatgagggacgcgacgctcaccgacgatccgatacgcgcaggggaagctgatttcttcgatgcggtcgagtatcgcacggtcacctggacgccgtacgcgattctcgatcctgtcaacgggcaaaccgtcagaacgcagatgctctaccagacgaacgcgaatccgggagcgtggcaaagcgcgggcgaaccgagtgcgacgggggcggtcgatgttgccggtctgggcctcgattcgggtgattacgtcacgcaggttcaattcaaattcttcggctcgaatggaagcgaagtgcctgcgggctcgagtccggtgaaaatcagaatcctctccaccacaaccgatgcgataacgacttcgggaacctcgtacgacgataacaagcttaccaatggcgcctacatgactggcgagatccgtttcccaggcaactcttcgtacgtctctatcgaggacgagggcgtgaagaacgcacgtaccgccgagacgaacgttgtggcgaacaatccccaggtgggtatcgcggggcacgaaaaccccctgtcgcccaacccgattatccccggcgaagaactcacgtacagcatccgccacttcatatacaactcggtgctgcgcgatgcgacgtcgtatctgatcgtcgatccgaacatcgagatcctcgacgtggcgcttgacgaccggtttcccgatgccacatggtcggtgacgaaggccagcaacggctaccagctcgtcaaggtcgaatggaacggcgacatcacgagcgcatggacgcaatacggcatcagcctcaagggcatcgcgaagccgggtatcgggtcgaacgcctacttccgctacctcgttgcaagcgacgatccgacgcagcagtactcgaacggcggcgtggtggacagctggtggctcaacataggagccgatggagcccttatcgaggcgattcccggccagccctacggcgcgacgtttcggcagggataccctgtcgacaacgggttggggatgaaccccctcaagcttgcatcgactgatgggaccgattacgcgctcacgcaggcggtcgatacctcgtcggcacccaagacgggctattactcgctcgacatcacgaatcccgaatcgacgaatctcgaggaggtgcgcgtcatcgatatgctgccgactctcggcgacgtgatggccctgagcgacaacgcgaagaagagcacggtggcgctgcaggtcgacggtatgacgcttgccgatggcagtgcgctgccgtcttcgtgcgagctgtattactcagaggatgcgacgcccgccacgaaccgcatcgagctgactgatttctcggcatcgtcgggcgcttcgtggattccatggaacggcgcatcgccgctgcctcctaccgcgaaggccgttaagctcgtgaagaccgacggattgcttgcaaccgagtcgttcggcatgcgcatgcaggtaacgcttccccaaaacgacggcggcagcacgcttgtcgcatggaacaccatgtcggcgggcggaaagcatgcgggcggctacatcgttcccggagagccgcacaagtccggtttctatttgagcgagaacggcgccaccgagaagcttgccggcatcctgtgggaagataccgacggaaacgacctgcgtgacgcgggcgagcccgtcttttcgaacaaggccgtgcgcctctacgattgggatgacagcttggtcgctcagacgacaacggatgttgatgggcgctacgaattcacgggactgcttcccgagcgctatcgcgtggaagtcgacatgcccgctaacctcgagctgtccgaccatcgggttggttccgacaagtcggtcgacaatgatttcgttcgcagcgatacctatcgggcgagcgcgacggtgaaccttgccaccgaaacgaatcccctcaacatcgacggcggtttctacgcgaaggcgagcgtgggcgattacgtttgggaggacgtcaacgagaacgggttgcaggaatctcacgaacctgggttcgcgggtgcgaaggtgaccttgtaccgcatggtcgacggttcgccggtgcaggcgggttcgatgacgacgggcgatggcgggcgctatgcgtttacgggccttaagcccggtacctataaggtagcggtcgatgcgcttgacgattatgtcccggccgcgcatgccgtcggcggcagcggtgctgaaaacgattcgaagctcaaggactcgtgggataccgaggagttcgccctcgaaagcggcgatgcccgcaccgatgtcgacgcgggtcttgtcagggcgctcgatggcacggtgaagctcgtcaaggtagacgagaacggcgatccgctcgccgaggccaccttcggcatctgggccgacggtgcgaacaccgaaaccgatcagccgcttaaaaccgtggaaagcgggtctgacggggcggtcgagttcgcggacatgcccgcaggaagctacatcgtcaaagagacggaggccccccatggctacgagctcgatggtgcggagtaccctgccgatatcgtgagcaactcgcagcttttggtggatctcggcgagatcgagaacgttttgagcttgggatcgatagcgctgaccaagaccgacggggaaggcgcgccgctcgccggcgccacgttcggcatctgggatggggcggatgatcccgaggcggacgatcctctcgatacggccgaaagcgggtctgacgggtcggttgtgtttgccgatatgccgcaaggttcgtatctggtgcgcgaaattgcggcgccggacggttacgtgatgaccgacgaggctttcgccgtcgaactggaccgctctacgctttcgtttgccatcgggcaggttgagaaccagaaagaagaggtcgtcgaccctgaccctgaccccgatcccgaccctgaagacccgagcgcgccgaccgatctcggcgatccgtcgaatccgtcgaacggcaagaagccggcttccggtgcggcgtctgcaacgggggacggcgtagcggctgcggtcggcattttggttgccgtggccctggcgggagcgctcgttgcggcactcgcgctgggacgcaaagcgcatcgcaggtagcggcgggcgcccgcgctgttgcgggcgcccaagccgattgctcgatttctctcggcctccgcgggcgagctgccccttgcggcgagcaggcgcgggcgcatgccgtcgggccgatctgcatcggcccgacgaacgaccaggacggctggtcggcgtctatgcgcttgcgttcgcggcagcctgcttgcccgcaactctgccgaatgtcatgcagtcggcgatggcatttccgccgaggcggttgctgccgtggattccacccgtgcactcgccgcatgcgtacaggtttttcaccggggcccccgttgcatcgagcgcatggcattccacgtcgattttgatgccgcccatggtgtggtgaacggtcggcacctttctgcacgcataccagggtccttccgtcagctgcacgtcggcagtgttgcccgccttgaacccgaattcgtcctcggcttctccggcaacgaccgcattgtaggcatcgatggaagcttggagcttggcggcgtccatttttgtctgttctgccaggtcttcgatggtctcgcctttgacgatgtgcccgagggagagcatgttctcgatcgtggcgccgtttgcgtctggttcggtttccgaggggtagcgaacggtgttgacgacgatccagtacgttgattccggttgcgcgaagatggcttcgcacagcttgtcgcgctcggctccctcgttgacaaagcgcgaaccctccttgttgacgaagatgcggttgcggcccgaggtgcggatatcctccatgagccccgtgcccggtgttccgcaggggtgcagctgtatgtcggataagcccacgagctcgacgccggcgccttctgcgagctcgaggccttcgccttgcgcgcagggcttgatgttggtgcacccgatggtgtcgtcgagcttgacgctcgaccagacgcccgtgttcaccttttgccggtattcgacgttggctccgaatccgccggttgcgatgatgaccgatttcgcttcgacggtcacgggcttctcgccgcggaaagcggcctcgacgccgacgaccgcgccgttcgagtcggttgcgagcttcgttacctgcatctcgttaagcagggttatcttgtcgggattcttctcgatataggagacgaacgagcggatgtaggtgttgcccgaaggcgtggcggggtagtggctgcgctcgccgagggaaccggtggccgacccaacctcgtctttgaattcgacgccaagctcctccatccaatggacggaatcaagggcgttgtcggtgaggtaatggaccagcgtcggatcgccgaggttgtggccgccttccatcgtcgagttgtaaaacgtctcgatcgagtcttcgatgccttgtttttcctgacgctctggatcgaccgcattgagcgcgccttcggaaacgttcgtcgatccgccggtgatgccgcacttctccacaacgacgaccgtggcgccctcctgcgccgcagatatggccgcggcaaggccggcgccgccgcctccgaccacgcatacgtctgccgtgtaggcgtcggcgatctcttcttcgggggctgcttttccttcgaggtccttaagcgcgccggcctggtcggcgcaatccttgacgccttgcagcaggctcatgctcgaaagggtcgctccggttaccgtgtcgcagttgagcgtttggtattccatcatcttcgaagcgatctcttcaagcgcgtaagcgcccacgccgagcgattcctggctcgtaccggtgtcgattgcagtgatcgccgtatccgagaacgtcacatcgatggtgaacggtgcgttatggccgaccacgtcggcgctgtatgtgccggcgatccagccggctgaggccttctcctcgggtttggcggcgcatcccgtcaaaccaaatcccatcaagcccccgtagatgccgagcagtgcggctccctgcacgaacgttcttctgctcatgctccctgacatcatctgcctccttccgcccactttccctgtgggcaccgtttcttcgctggactcgcgtgatcgagccgctgcgagcttaggcgccgctgcggtgcgctgctaggctcgaaaggtatcctggcggcgtccaaaatgtacctatttgcaaacctgcaggtaaaacggctgtcttctgagcagcgatctgggggatgagccgaaagcgcggtcggcgaatgctataatcccttcttcgggaggaggtgtgcatgaggaagcaaccacagcggtccggtgccgatcccgatctgcatacggggtcgttttctgatttcaaggcggtgtttctgcctggcctatccgttgcgtttttcggcatgggccttatgcggctgtggtaccagtacaacttctacaaccttcatttctcagccgattacggccatgtgacggtgggcgccaatatcgtgcgggtcggcgtgatcgcgcttctcttgttcctgtcgtacagaacgaagttttcgcacggcacgaaatccttgttcgtgtggtcgggcttagtgctcatgaccttatcgggcgtgttttaccttgtggatctgtttttcggaaccgtgaccttcgaggttgcgcgtttcgtgatcgggggatgggccttgttggcggcgagatcatctgggtgttctttttgcaaaggctcaagcccggcgaagccttcctctacgctgccggcggattggcgctttcgtgcttgctgtcgctgggagccggctacctgagtgccgaagtcgtcggcatactcaacctgttcatacctgccctttcggtgatcgcctactggcaatcgatggcggttttggataagaggggcgatccggcggcggagcagtgcgatacggcttacagcgatcgttatcgcccctacgtcgttcagctcgtcatcgcctttctcctgtatgcgcttttgctcgggcttgcgctcggctaccccgatggtcggatcagggagctgtctcaaacggtgcgctccatccatcagcttctcgtgatagcctgcattgcctttgctgtttggtgggtgctcgtgcgggggaggggcttcagcttgtcggcgtattggggttttgaaaacgccctcatgatagcctgcataggttttttgatgagcggctggccgggatccgaagaggtggggacgttcttcgctaccaatgcgataacctgcttctacattccgctcgttttcttcatttacctcataggaaggcattcgcgcaaggagaccgctttgatatatgggttcgtgtacggcggcgcgctgctggcgatgagcatcgggcggatcatcgtatacgtggtgggcccgacgctcgatcatgcgctctggttgcttatctgcatggcctttgtggttttgatcgagatggtcctggtgcttcgcccccagccgcaaactcggcagccgctggcttacgagcttaaagcgcttcccgacgccttgcccccgataaccgtcaaccttgaagaggagaacgaccctttcgagctgttcggcagctcgttcggcctcagcgcagttgaagtggatatcgtgcggctgatcgcccagggcagaagccgaggcgttatcgccaagcagctgagctactccgaaaacaccgtgcgcaactacacgcgcaacatctatcgaaaggttggcgttcattcgaagcaggacctgctcgatgcgatcgacggatttggcggctagggcggcgcagcgggacggctgagccggccaaggcggttaagcggcctaggcgtatgaggcggcgagtgaccgatgcggcgctcggccgggacggcggcagacccgcgcggcgccagttgttttgcgggtcgcatcagggcgtatcagccgatctgcctgcttgcttgcggtaccgcattgtcgtgcaaattgcgggctgatggatgtgctgtatctgcaaaaaggagaggactctattgaagaactgcctatgacctgcgattagcatgaagttataaattttatttccgtccaatggtgtgtcgttttctcatgtaggtgcaatatattatattgtaacaaattacatagcaaataaggacgcgacatacatgaagaaaactatggaaagatacggcacgaagacggggccgcgtcgtacgctggcgatttttctggcgtttgcgctggctttttcctttgcgggaatcacaggcgcaggcggaatggtcgctacagccgaggcgacggattcttccacggcgcccggtgcgtcgaaagcggacgaagcccggcctttcgagtcgaatgcggaagatgctgaacccgaattagggggcggcgaaaatccggattcgccgagcgaagcggggcagggtacggcagaagggggcgacccggaagacgccgacggttctgccggagacgaaaaccccgccgcaggttcggatgaaccctctgtcggcgagctgccgtctttcgatgcgtccgcccggggcgacgaggggatttcgtcccaatctctcgatgacgagggcgaaggtgacgagatctccctgctctcgacgctcgaggcgaacgacttcgcatcgttgagagcggcgatctccagcgcttcgtcggtgaaacggtttcacttaaggccgatattctcgttacggctcaaataaacctgggctcgacggcaaagagcatcacgatcgacggttcgaacccggacggtgacgattacaagcttatccgcgactccggttatgcgggctacttgattcgcgtcgacaacggcaacggcctgacgctttccaatgtgactatggacggcagggcatttcgggcgcgcgggcgcacgtctatctgacgaacggtagccttgtgctcggctccggctcggttttggagaacagccgatcggttggccacggcggtgcggtgaacgcgataggcgggagcgttacggtgcagggcggggcggtggttcgaaacaacaccgccgtttcgagcggcggcggcatctacgcgaacggcggaaccgtgtcgttggagccgggctctcttgtaaccggcaacagtacgaacggcgatggcggcggcatcaacgtttacaacgcgacaggggcctcgtcggtagggttttcaatggcggcgggcgcaacggtgagcggcaaccgcgcaaacaacggcggcggcgtggttgtgcgcttgatgaggtccgatgatttcgcgacggtcgacggcacgatttcgggcaacagcgcggcgaaccacggcggcgggctttacctgaatccccgcaatgcccaggcgcaatcgcttagccttaccggcacggtgcttaatggaaactctgctgacggtgccggtggcggcctctatgtcgccagcagcaagccggttgattcccttgcgcttacgggcgttaccgcttcatccaacacggccaaatcgggcgtcggcatgttcctgtaccaccgggacgctccgcaaacctacgatctcacggtggtcggctcgcaattctcgaataacatcgctaccgataacggcggcggcctctatgcggcatcggatggcgctttggacatgaccgttctcggtacgacggtcaacgacaacagctcgggcagccagggcggcggcctatgggccatcggccgtgcgtactcggcgagctctttgggtattggcgacaactccgttgtatccgggaacgaatctgcaaacgggggaggcgtgtactaccgcacgctgttcgccgcctccacgttcacgctgtcgggtggatcgaggatcgaaggcaatacggcgagtgcatcgggcggtggcatcctgctgcagggtttgagcgcgtttaccactgaggcgggcagccttgtgcagggaaacaaggccatcaacggcggcggcgtgttcgcttccggctcatcggtcgatgtcgccggttcggtgatcggcaacgaagcctcgagcaggggcggcggcgttcttgtaaccaacgagggctcgctttcggtgcggagcgattcgctcgttgagcgcaacgtcgcctcggatggcggcggcgtcgccgtcgtcgggtacgcgcagggcgcgattgccggcacgatcgagaacaacaaggcaagccagtacggcggcggcgtgtacgtgtccaacgcgacgtacgacgtcaatgcaggctcgatcgcgggcaactcgtcggagacgggcctcgggcacgatttgtgggtcgcccccgaatcggctgcgggcagcgcagccgacggcggcatcgccaacctgcgtgtaggcgatgcggcgtttaccgacagcgcggatcgcgacaaggtgctcatcggggcaggcacgtcgggttcgatcaacttcctcgagagctttgccatgaagaatcatctgctgctgcagaacgcgggtgccgatcgatcgacggcgtcggtggcgcttggcaaaacgttgacgctatcgggcaagctgacgctcggggttggcgacggcatgatgtcgcatcgtttgacgatcgatcccgatgggggatcggtgctgtacaaaaacgatgccgaagccgaaggcgttgatgttttgaccggcgaagtcgtcgcggacatgtatgcgatgcctcgaaacgctgcatcggtctacctccaatggcccgaggccggtcccgatcgcgtcggcgagtcgttcaggggctggaacgacgatggcacgatgcttcccaaccgcggcgtcggctccatcgaggtttcaggcgatacgacggcaacggcgctctggggcaagttctccgttcggtacttcgacgaggacggtgcgacgccgatcacgggcatcgagccgacatcgtatgcgttcggagccgaagagacggcgttgcccgcgccgacgaaggacgggtatgcgttcgtcgggtggtacgaaagcgccgatcattcgggaagcccggtgacgtcgttctcgaacgccgatcaggaagataaggcgtacttcgccaaatggaaggagatgcccatcccgcccggtcccaaccccgaccccgatcccggcccggagcccgaccccgatccggcgcccgtgcccgatccgtcttcggatacgggaggtacgcggttgccggggcctgccgcatcaggcaagggcatggcggctacgggggattcgcctctcgcgcttgtcggcctcggtgcgttggcccttctcgcaggcactgcgcttctcttcgtgaaacgccgcaacggctagcggtgcgaacgcatcaagcgtagcggactgtcaaacgccggaccctcgggtccggcgtttttgcgtctgaaccgagaataaagggttttcccctagttttgactcgtgcaaactcccatgacgtaacgtcgccgccgtatcccctgccgaatgtgtgtatatttcgtgatgggagacgacgaaaggagaggatatatgagaaaacgcaacaaactcgccctctggttgagctcgatgtgcgccatcgcgttgttcatgggcctagtagcctgtgctccgcaggcagacaactcggccgatcagaacaagggcaccgacgagcagaaagaggagccgaaacaggttgagacccccacgccagacgagttcggggtcgtaaccgccgagatgtggaaaggcatctatcccaacgagtacgcaacgtacatggaaaacgaagcgaactcgcccgattctggcaagcacaactacctcgagctgtaccctgcgctcaacacgatgtacaaagggtacgccttcgccttgggctacgacgaggcttcgagccacctgtattcgctcgagagcgtgaagaattcgccgagaaccatcgagaaggagcagcttgccaactgcattagctgcaagaccccgcagttcaccaatatggtgaacaccgaaggcgagcaggtgtacaccgagaagttcaacgatctcatcaacgagttcaccgaaccgatcagctgcgccaactgtcatgcgaacgatccccaatcgcttaccgtgggtaaccagttcttcgtgagggccataggcgacgatgccaagaacgttcccatggaggctcaggtttgcggccagtgccacaacgagtactacttcaaccccgagaccaaggcgactaccaatccgtatacgggcaccgatgcgatgacccccgatgccatcctcgcgtattacgacgagctgggcttcaaggattgggaacatccggacacgggcgctgcgatgatcaaggtgcagcatcccgagttcgagacgatctacggcggcaagcagactcagatggcgaagaacggctacagctgctccgattgccatatgggcactaccacttccgatgacggcaccgagttcgtatcgcacagctggacgagtccgctcgagaacgaggagctgctgaacggtgactgcaagaactgccatgccgacctgaagaagcaggttgccgattggcaggccgaggaggaagagcgcgtaacggctatcagcgagaagatcgaggacatgatcaacaagatcgccgagcagaaaaacgccggtacgctttccgacgatcagctggcggagctccagaagctccatcggacggcgcaattttattgggatttcgtgatggttgaaaatagcgagggagcccacaatcccgacctgaccttcgaaacgctcgataaggccgaggctgccgtcgacgaagcgctggccatgctgtaaaccatgcatctttgagtctctcctaatgggagggaggtccaacgggcctccctcccgcgcaattaccccgccaagattggatatttttgccgtttcactcgaaaaagtggggcgtttcgggctaattccccctaaatgggtgataggtttttaaggtcttgtcggataccattcctgtggtaaagtgcttttgtttcgtattgcggtgcgttttgctgcaatgccgcgaggggcacgacaatgtaagcgagagaaaatgtagaaagggggtaaagaagagatgagcgaagaagaatccaaagtggaagccgccaccgaagaagaaaccgtagcgactccggaggccgctccgaagaagaaaaagaagaagtggcctatcgttgttggcgttgttgtggtagttctcatagcagctggtgccggcttctgggtttggcacgaacagcctagcttctgcagcgccatttgccatactccgatggacccgtacgtcgaaggcttcgagcaggagccgggtaccgccggtgtcgataagtacggcaacgaggtgtctaacaccaacgccatgatggcggttgctcacaagatctcgaaggacgaaggcggagcaggcaccgattgcctcggttgccacgttccgacgctcggcgagcagatctccgagggcatgaactggatctcgggtaactatcagtatccgctctacgagcgcactgatgaagatctggtcgaggctcgcggtcttgaggccgacgagttctgcctcaacgagggctgccacaacctgactcgtcaggatctgattgcggctacggctgacatggagcgtaacccgcacgttgctcagcacggcgagatcgcctgcaccgaatgccacaaggcacatcgtgcatcggtgaactactgctcgcagtgccacagcgatgccgagattccggacggctggctgacgactgctcaggccaacaagcttgagggcgtagcgtagtttacgagaatttagccgccgctcggttttcgggcgacgggctgtgagccgaaaggcaaacggcgaagacgattgcatatgcaagagggagcccgccaagcgcatctcgcgatgccttgacgggctcttttcaagagctgggaagctcgatggaatactaagacattctgtgcaatacgctcgaaagggcaaactcgcagaatcattcggtaaatactctgttttcctcgcgcgtcgcgcttcccagagtaaaaaggtgttagacaattgacgaggttattcgaggaggcgaacgtgaacgcgaaaacgaaaaagcgtatggttgtagtaaccggtgtaatcgtcatcgtgttgatcgtcgtactggcccttgtgggcggttcgacggcggcgaagtcgatttccgtagcgcaggctgccgatggcagtcatgctaacgaacgtgtgcaggtttccggcaatgtggtggagaattccttcgagacgaccgggaacatgttgacgtttgctatttacgatccggaaggcgattcgtccgtccaactgcctgtgagcttcgagggcggcgtggcggcaacgttcggaaacgacgtgacggctatatgcaccggcaagatcgatgaaaacggcgtactgcaagcaaccgaactggtgacgaagtgcccgtcgaagtacgaaaacgcatccgatgctttgagcgttgcgagcctgctcgactatggcgagagcgtgtacgacaagccggtcaaagttgccggtacggtgaaggcgggaagcctcaaggccgcaggccagggcgatcgcttcatccttgtcgacgcatccgacggcaccgagatggcggtcctgttcgacggggccctgtccgacgagatcgcggacgggtcatccctcgtgctgaccggctcgctcaattccgattcgaagtttagcgcgaccgacgttgcgctggaaggataatacatgtcgacatacggtttgatcggcctgcttatcgcctttgctggcgtagcagtatccattgtgtgcctgctcgtcgggcatctgatgggccgcaagcgcacgagcgggttcgtcgagacgcttacttggggaggatacatcgcctctatcctttccgcggtggcgctcacgttctgctgtgctctgctcgtgttctgtttcatgacgggcgatacctccatccaatacgtcgttcagaaccacagcgacgcctcgggcacgctcgggtggctttacaagctttccggcctgtggggcggccgccaaggttcgcttctattctgggcatggctgatctcggtgttcaacgccgttgtggctattcgctctatgaagaagatggataagctcgacaacatggcgctgctcgtttcccagatcgtgctggcggcctttgcgggcgtgctgctgttctccgagtcgaacatgccctttacggctatgcctgcgatgtacttcgactccacaggcgcgcttaccaacggcgctcagatctggggcatgaacgcgcttctcgagcactgggccatggctattcatccgcctacgctgtttatcggctacgcgggtctcacgatcccgttcgcgtacgccatcgcggcgctcatcgtgaacgatccctcgaaggcgtgggtcgagcgcagctcccgttacgccatcttctcgtggctgttcctcggcatcggcatcggcctcggggccgtgtgggcctatgtcgtgctcggttggggcggctactggggctgggatccggtcgagaacgcgagcttgctctcatggctcgtcggcgtcgccctcatccacagcttcacggtgtaccgccagcgcggcgcgttcaagcgctggagcgtgatgtgcgcctgcatcacgttcgcattcgtcatcgtgggcacgttcatcactcgctcgggcctcgtgcagtcggttcatgcgttcgagggcgatagcgtctcgctcgtgctgttcctggctctcatcgtcttgtcggtggtggccggcatcatcgggctcgttatccgctggaaaagcttcggcccctcgaagggcggcgaggattccatcgagaacatgatgtccaaagacgccgcatactacttcaacaacgtcatcatggtcgtgttcgcgttcctgctcgcgtacctgactatctcctcggcgctgccttcgtggctgccgttcggcggccaggcgctttcggcgggcacctacaacacgatcgcccgtcctctcggcatcatctactgcatgatcctcgccgtctgcccgctgctctcgtggggcaagaccgagggcaagcagttctggaagcgcgcccgcgttcccggtatctgcgcgctcgtgctgttcgtcattctcatggcgtacttcctcatgtacctgcttccgagctacgatgccatggtggcggcgggtggaagcaccgcggcgagcgtgaccgattacggcccgtcgtggtactacaacgggatggccgttgtcggctttatcgtggcgagccttctgttcttcaattcgctcttcatgttgggtcgcggtctgcgggcttacaagaaaaagcacggcaagaacgtgttcgcctcgctgttcggcatgttcaaagaccatgcggccacctatggcgggttcgtcgcccatatatcgatggccatcatcctcgtgggcctcatcggatcgtcgatgtacgtgaccgagaaggtcgagtacctggagtacgatcccgaaaccggcggcaccaacgacgagttcgtcatccaggatttcacgctcaaatacaccggcaactccatcgatgagctcgagaacggtaccgatatcctttatacgctcgagttcgatgtgtacaagggcgaggagttcgtgggccatgtggccccgtcggtccagcttgtttcgaccactcagcagcagaagctgctcgcgagcgtcatcgggtttccgaccgaggatcttttcgtcgtgtaccgcggcgtgaacaccgacggcgatttcgcgctcgacgtgcgcgtgaacccgtgtatctcgcttgtgtgggtcggtttcggcctcatgatggtcggcatcctcatcgcgcttatcggcaagcgcaagcccgtcaagaagggcaagcccggcgagatcgatcccggtgacgggaacggatcctcgggaggcgtggtcgccgttttggaatcggtcgaagtaacgcaaggggccgatggctcggtaaccgtcgtatccgaagaggtcgtcgtaaccgaagacgcctcagatgcggatgccgaaccctctggaaaagaggcgtaggcaccgtgggcgacgctgccataacaacctcgaagctctcgaaggtcttcgggaaccgtcgggcggtcgataatgtgaccttcgaccttccgcagggcgcgttcctctcgatcttcgggccgaacggggcgggcaagactacgcttcttcgcgtgctctccacgctgtcccgtgcgacgtcgggcagtgcgacgctcatgggaatcgatatcaaggaggagcctgataaggtgcgcgaccatatcgggctcatatcccataactccatgctctacatggatctgaccgccgaggagaacctgctgttcgcagcgaacctctacggggtagaaaaccccaaggagcgcgtgctcgaactgctcgatgctgtcgagctcaagcatcggcgcctcgatacggtgagaaccttctcgcgcggtatgacccagcggctttccatcgcgcgcgctctcatccacgatccagacgtcgtgttcctcgacgaaccgtattcgggtctcgacccgcatgcagtcgaaatattcgacggcctgatcgagcaggtgcgcgaaggtcgcactttcgtcatggtgagccatgatttgcagaaagggttttccatgtgcacccacgcactcgttttggcgaagggccgcatcgtcgcgttcgacgagaaggagaacctcgatttcgaggagttctctcggatatatcgcgcgaccgtcggcatgggggtggcttgacatgggcgtttccgttacgcgtccttcgacgttctctcaatacaagaccctgctgatgaaggatctcaagcaggagttccgcaccaaggagatgctcacctccatgggtatctacgcattgctggtgcttgtggtttacggagctgcgcttgcgcagacggctcaggtcttcgatatcctgcaaatgagcggcggtctgctgtgggcgctcatcgtgttcacgtcgcttctgggtttgaaccgttcgttcacggcggaaaaagagcaagggtgccttgagggaatcctgcttgtgccgcttgaccgctcggtggtctttctggctaaggccacgtcgaatcttttgttcctgctggttgtagagatcatcacggtgccgttgttctactttttctttctcacctccacaacgccctcggacagtttctggctcataatcgtgccccttttcgtggggacgatcggcgttgcgggcatcggcacgttgctctctacgatcacaatcaacacgcgcgggaaagacgtgatgctcgccgtgctgttcatcccgctcatctttccgctgctctacgcctgcgtttcggcaacgaccgcagtcatcgtcggcggggaaacgtacatggacacgttcacgatgtcgcttgcgctggcgggcggctacgatgtgatcatggttttgctgagctgggttctctacgatttcgtcatcagcgtttaggggtacaatggcgggaaatccgcttgtctacgggatggaagtaagacgcggcttgcatgccgcgtaaaggagaaaaggagtgttatggccgaaaaagctaaaagggctgtcaaactgcccgagtctggccaatggcccgatcgggtcgcaccgatcgcactcggtgtgggcgggctgcttctcgttatcgggttcctgatggcgtttctgtacgcttcgccggtgaacggcgcggcggtcagcgagcctgtgctggttggcgatcagatggtgaccaacgtccagctgctttcgcagaagatattctacttccatatgccggtcgcgctcgtttcgttcgtggctttggcgtttgccggatactatggcgtccgcttcctcatgaccaaagaacagcgcttcgatacctgcacgtcgatctgcatggagatagcgcttctgttcgtcgtctgcaccatgatcacgggcgagatgtggacccgcttcgagtgggggctttggtggacatgggatccgcgcctgaccacctacctcatcctcatgatcatcgtgatcgcgtacttcatcctgcgcaacgccatcgacgatcccgagcgccgggcgacctacgcttcggtcatcgccatcatcgcgcttgtcgatgtgccgatctgctacatggtgacgcgcgttatcccgtcgagcatccacccggtggttttgcgtgagggcggcatgacgggcgacatgggcatgacggtcggcgtcgtgatgctcggcatgacgttgctcggcttcgccttgtaccgcatgcgctttcgccaggtgaggctcacgcagcgcgtcgaagccatcaaagagcagctcgaagattagggaaagggaaaaccagtgaacgaaattctcgttgaaatctatagcaccgttattccgtcggcaccgtacatcattgcggcgtatgcgctgcttctcgttgttttattcgtgtacgcgttcatgatcatgcgcggtacgaagaaggcagaggcgcagatcgcggtcctcgaagaggctttagcggagaagaacgcaaccaaataatcgctgcagcaagtagtgatacaatcgaccgatgcaccctgccgtatggctcggcatcggtcgatttctttatttcgcaggggcgtccgtcgcacggcggcatagggcccgtcgacattcgacaggacgcttgagatcgaggaggaacatgaaggctctcattcccgccgcaggcatgggcacgcgctttctgcccgcaaccaaggcgcagccgaaggaaatgctgctggtcgtcgatcgaccggctatccaatacgtcgtcgaagaaggcttggcatcatcggccgacgaagtcgttatcatcaacagccgcgagaagcgggcgatcgaggatcacttcacgcccgcccctgaactcgaagccgcgctgcgcgccaagggcaaggatgccttcgccgatgcggttgcgcatgcgggaaacctcaatgtgagctacgtgtatcaggacgaacctctcggcttgggccatgctatccgctgcgcggcggaaaagaccggagacgaagcgttctacgtgctcctgggcgatgtcctcgtacccgataacgcaatgcttccgcgcatgaaggagatatcggacgagcatgcgggggcgagcgtgatcgccgtcgtgcccgtgcccgacgaccaggtcagcaggttcggcgttattgcgggttccgaggttgccgcgggcgtgtggaaggtcgattcgcttgtcgagaagccagcgctcgaagatgcgccgtcgaaccttgcggtgttcgggcggtaccttttgagcccgcgcgtcatggagcttctggctgatgtcgagcccggcgtgggcggcgagatccagttgaccgacgcgctcgatgcggtgttgcaagaagaggagatgtacgcactcgttatcgatccggccgatggtttcgataccggaacggtggaaagctggctcgagacgaacaacatcctgttcaaaagggcgcacgggtagggcgttgcgtctgcgcgttcatttttactccaggggccgatgcggcgtttcgcatcggcctccgtttttgcttagctcacgacgttttgcgggtgtccttcgataaacgcgcggatattggcgaacaccgtgtcgagcagccgcgtgcgggcttcgtgggtcgcccaggcgatatgcggcgtgatgacgatgttcttatccttcgcatcgagcagggggctgttttgggtcatgggctccactgcaacgacgtcggccccgaatccgctgagctttcctgcaatcagagcgtcagcgacggcccgttcgtctacgagcgttccgcgggccgtgttgagcagcatcgcgccgtctttcatcttcgcaatcgctgcggcatcgatgaggccgttggtttcgggggttgcaggtgcgtgaagcgtgacgatatctgctctggcaagcagctcgtcgaacccgacttgccggcaatgctcgttttcgcaggcgggctttgccgaacggctgttgaacagcacgtccatcccaaaggcgttcgccacgcgggcaaccgcctgcccgatgcttcccatgcccacgattccgagcgttttgcccgctatttcgacaagcgggtagtcccagtaggaaaaatcgatgctgcgcacccattctccgttcatgaccccgcgcgagtgggcgcctacatggaggcagagctcgagcagcagcgcgaacgtcatctgggccacatccggggtggaataggcgggcacgttgcacaccgtgaccccgcgcctttgcgcggcatcgagatcgaccacgttgaagcccgttgaggtgagggcgatcagttcaaggttgggagcggcgtcaagcgcggcttcgtcccaggtgattttgttcgaaacggctatgttcgcatccgctacgcgaaaggcgacttcgtcgggtgcggtgcggtcgtacagggtgaccgatccgaaggcttcgagctgtttccagctgagatcaccggggttgttgacgtaggcatctaaaacgacgatgttcataccggtccttttcggttggctgcatgcgactgcgattctctgccgaaattgtaacacttgcagactacgcataccgctatggagacatgctctgctgcagcatcgggggtgcgttcgtctcggatgccgtatgccgagcgcgaaacgcggcggtccgatcggcttgcagggcgaggggtgaaaccaaatgcgcctagaaaaaggatcggcccgggggagaggggagctccacccgggcccacaaggaggggatgatacggtgcctagcaccgctactgctttatgaggggtaaaagcagtgcaaactgaaggggggatgaaccttctttatttgcgtgatgccagtataaaatcccatcttgcagacggtatgtgcgacgagtgtgcgaattgtgaattggatatcaggacggtaacaaaggccataaaaatgctatttgaactgggaaaacaccattcagaagtttcgttgatgctctggttttgcctgtgaaggaaccgtgaagcccctcgttggcgctcccgatcggtcggttggcggcgacgagcggttcccgctggttttgcaacggcgcgttcttccgctgccgggcttatcaattggtcccgccgccgatggaccctttggcgggcccgccgttgccgtcgaagcgttcggcggtcttaggttgccgtcgcactttgatttgccttgaaaaaaggatcggcccgggggagaggggaactccacccgggcccacaaggaggtgatgatacggtgcctagcaccgctactgctttaatgaggggtaaaagcagtgcaaaccggaaagaggggagctttccgtttgctgggtacagtataaaagttagcattgaagaacatatgcatcagccgtgaatgtcttgtggattggcggctaaattgcggttaacggctccctcatctggggtatatcgatatctgttaccgctcaccccttaaatcgttgcgctcgcgttgactaattgcgcgcgtgatacgcgtatagtgtcacccatgaattattcgaaaagacatacgcccgaagcaggtcgcgcctccttgcccccgcaaggcgaaaacgaggcggcgcggctatcggcgaccgcccaggcgcctgcagccgcccaaccgcccgacgctgcacgtccggttgaatcaccccagccgcccgctcagaagaagtacggcttcttcacggctctggcgatgatcatcggaatctgcatcggctcgggcatcttcttcaaaagcgataacgtgctcgccgcaaccgggggcagcatcgctctgggcgtagccgtgttctgcctggcggctttcgccatcgtgttcgggggcatctcgttcagcgagctcgccgcccgcaccgagggtcccgggggcctgatcgcctatgccgaaacgttcgtcggcaagcggttcggggtcgcggtcggctggttcacgatcttcggttacctcccctcgatcgtcgtcgtggtttcctgggcggtcggcatctacacctgcattctgttcgacatcgatgcgggcatcggcctgcaaatgctgatcggcggggcgttcatgatcctgtgcttcatctggaacatgctggcaccgcggttcgcgggggccttccagaacgtgaccaccgtcgtcaagctcataccgctgctgttcatcgcatttttcggtctggtgttcggcgatcctctcgcggggctctcgcagcatggctccgcggcggcgggggcttctctcgcgtggatcgccgcaatcgggccggtcgcgttttcttacgacggctggatcgtttcggcggctatcgcgccagaactcaaaaatgcgaagaaaacccttccgatcgcgcttgtggtcgcgcccattatcattttggccatctacgtcggatatttcgtcggggtatcttcgtttctcggccccgataccgttgtcgccatgggcgacggccacgtgttctaccttgccgaacagctcttcggcccgcagttcgcccgcgttgtcgccgttggcgtggtcgttgccgtcatgggtacggtcaacggactcacgctttcgttcgtccgtatgccctatgcgctcgccctctcgggcgacataccgttctcgcgttacgtcggccgtctgagccgccgcttcggcatgccgatcgcatcgggcgttctggcgcttgcggtttcggcgttctgggtaatgctccatgtggttacgcagaccgccggcctgcttcccaactccgacgtctcggaaatcaccatcgcatcgagctacatactctacatcgtcttgtacgtgcgggtattccttttatggcggtcgggcgagattcgcagccgtttcaagggcgttgtggcccccgtgttcgcaacgatcggatcccttttcatatgtataggttctatgcagaatccggcgttctggagctgccttgcggcaagctttgccatctgcgcggcgggcgttgtgtatgataggttcaagcacaaaccgaccgacagctgaggcgaacccgaaggagtgtcgaatgcccgatatcgaaatgcggttcaacagggatatgctcgtattgtctgcaccggtggacgaggtgctctctcggcagggcgtcgatatcgagcacgaccgcgagtttttgagcctgatcgaacccgaagcggttcgggaggcgtatcgtttggaatcggtggcgggagctcaatgcctcgtaacgaatactgcgggaataaccgcggcgcggctcgcccatgtgaatatggaggaccgcccgctcgagctggccgaggcatcgctgacggtgctgcgctcgctgcgcccccagcatatcatcgccgagatcggcccgacgtatctgccgatcgacgcatcgagcgcaacgtcgttgaagcagaatcgcgatcagtacgccgatgccgcgcgggcattcggcgcaagcgagtacgatgcgctgttcctgaacggcatggtgagcctgcccgacgtgcagtgcgccctcatgggcgtgcgcatggtctacgacggtccggtgttcgcctcgatcgacgtcgaggcggacggaacgatctcgcggcgcaatcagccgatcgaggaagcggtttcgctcatggccgaatacggcgcgagcgtcgtcgggtttgcaacggcggcccccctcgatgagacggtcgagcttgccaaacgcgtccgcgccatctgggacggaccgctgctcgtgcaacttgccgtgcggaagcatgatcccaaacagggcgtcgcaacgaaggagaacccttactactgccccgatgtcatgatcgaagcggcaacgaagctccgtggcgcaggcgttcagttcttgcgcgcaaccggcgctgccacgccctcctataccggtgcgctcgtcgctgccagtgcgggcttcgatgtcgtcgcccaggcgtagggatctccatggcgattgagaagagctccgattacggcgtcatgcagaagctcgtcgacgatctgttcgccagcgaagagttcgtgcggcgccttgatgcggtgctgatggccgaagcgtacgatctgcccgccgatctgcttgaggtggtgcagcttctgccgcccggtacgtacaaccgccagcgtttgtgcgatcagatcaactcgtcgatcgcagggcacggctggggtttcgtgtacggcacggtcgaataggctcgaacgggtttttgccacccggtctgttcgagcggtctacgcgagatcgtcctgagccggttcgagatgctttttggtgaactcgtcggcaggtacgggtcggtcgaagacgaatccttggattacatggcagccccatgctttgagctgcacggcttcgctttccgattctatgccctcggcgacggtttcgaacccgagggcgtcgagcagtcggatgaccccggtgagcgtggtgcggccccgttccgaatcgatcgattccccgaaaaaggcgcgatcgagcttgatcgtatcgaagggcacgtctttaagtatcgaaagcgccgaataccccgttccgaaatcgtccatggcaaccttgaagccgcgctgcctgagtttgctggccgtctcgaccagctgtaccgtgctttcggccacgatgctttcggtcagttcgagcttgatgaagctgtgggggatgccgtaggcgtcgacgatcttctctatcctgccgatcaggtctgcgctgaacaggttctgcctcgagaggttgaccgaaacgggcacgcagcgcaaccctgcgtccatccattgccgcagcctgatgcaggctcgttcgagcatgtagcgatccactcggtcgacgaacccgttcttctcgaagatgggaatgaactcgtcgggcctgaccaggccgagcacaggcgagttccagcgcacgagggcctccgctccgcagagcaccggcctgtcgccccggatgtcgtactggggctggaagtaggcgacgaattcctctttgagcagggcggtcgacatgatgccctcgatgtggcgcgctcgcatggcgcaggcgacgttctgctcgtcgtagaagatgatccttttgccggcatggcttttcgtctggcggaaggggatggccatatcctgtgcgatcaggttgacgtccttttcctcatctgcggtggagagccggtatgcgcagcattgggagacgatctggtagtgcgtttcgtccgatccgattgccgaatcgatgctgtcgagaagcgaaagcaggcggctttgggtttcgtcgagcgtttcggtacggatgagcatgagaaagcgatcgcccgtcaggcgcgtcaaaagctcggctctgccgaggctgcgcgtaaggatctcggcgacggatttgatgagcgaagagcccttctcgtacccgaagatcgtgttgtagagagaaaagccgaccaagttgaacagcacgagggagtgcttgccgtcaaagaggtcggagcgggcgttgaacttggaatcgaaggcgagcgcgttgtcgatgccggtgaggtcgtcttcgagtgcggcgtgggcaagcgctttctcgctgcggtttttggttctgaagacgacggccatcaggacgatcgccgtgcatgcgatgaagacggccatgacgatcgaggcgagcaggacggtgcggttcttggcttcgaggtaatcgcttggcaaaacgacgtcgatgaaccaatcgttgatgccgattggctggtaaacgatgaagcgcgacgacccgtcgtcgcctgtgaccgtggtcgatcccttccagccgccggcgagatcctccttcatctgctcgaaggatcgggcctgtatgtcgtcctgcccgatcgcatccgtgccgccgtaggcgttttcgccagtcgagcggaacaggatagttccttccgagttgattatgtcgatgtgcccgtggccttcgaagaggcttgcgtcgatcgtatccgaaaacgctgccaccgaaagcgtgcccacgagcacgccgatgggatctccgccccgatgcttcacatcgtacacgggtacggcgaacacgatccccagttcgccctcccacgaatcttcaaggggttccgacacgtagttcttaccgtcaagtgccgcttgaacgtatgcgcggtcggcgtagttgttctcgggaagcacgccgattcggctgtcgtagccgatgccgtcgccctcggagttcacgagtcccacgcgcatgaacgcgcccgagtcgaccatttcccgaaaatgctctatgagggaatcggagtcttcgatgttttcggcgacgacgaaggccgacgccccatggagcacgctgagcttgtcttcgatcacggcgttgacgcttgcgctttcgacctcggctatttcctgcatgaaaagaccgagcgacgatttgagctcttgggagatgacgccgatgcatccgaagaggacgactgcgataaccaggaggccgacggcgaaggcgaagagggtcgttgtggcgctgttgcgcggtagggccgtgtcgggcgctttgcgtgcgggcatattctgccgaacctccgaatgggtttcgcatgtgcgtatatcgggtgattgcgattgtatcagaacaaagcgaatatatgcgaaaacgggttcgcgatgaaatttttaaggagcgccggtgtttggctgcaccgcctccgttgccgttttcccgcttatgatactaaaagtatgccattttccagcggcatcgcatttcgacgataaaaacacaagccgaaaaattcggtaagatattcttaaacaatccgattcgtaaccattttcctcttgcctaaacgcattcgccaagctaccatatatccacgtccgaggggatgaagaacacaatatattgtggaaaaaacgctcatagtttgtggaaatctctcggaaaactggaaagctcgtggaaaactacttgacaaggccgaaggcgcatccggatcggcctggtggcacgccactgctcggtggctgcgctgtgctttgcgtgcagcgcggttattttttgcgcatcaatacgtacattgctatcagataagggagcgacatggttacaacaatcatcaaacgcgacggccgcaccgcagagttcaagcccgagaaaatcgccgaggcgatcgagagggcgttcgaagcgtgcggggccatgcaggatcgtgcggtggccgaagagatcgctgcgaaggttgttgacaagatcgagagcggcgccatcgaaggttctcccaccgtcgagggcgtgcaggatctcgtggaagagtcgctcatcgaagcgggtttcgtgcaaacggcgaagtcctacatcctctaccgcgccgagcgcaatcgcgtgcgcgacgtgaacagccgtctcatcaaaaccctcaaagacatcaccttctcgaaggcctccgattcggatatgaagcgcgagaacgccaacatcgacgccgataccgccatgggcaccatgctcaagtacggcagcgagtcggccaagcagttctacgagatgtgcgtcatcgacccgaagttcgcgcgcgctcatcgcgagggcgatatccatatccacgatatggacttctacacgcttaccacaacctgctgccagatcgagctcaagaagctcttcaagggcgggttctccacgggccacggcgtgctgcgcgagcctaacgacatcgccagctatgcggcgctcgcctgcatcgccatccaatcgaaccagaacgaccagcatggcggccaatccatctgcgatttcgattacggcctggccgaaggcgttcgcaagacctatcgccgcctctacaagaagcaccttgccgaagcgctcgatcttctgaccgaagtgggggacgtgaaggcgtacaccgaggaaatgctcggtcgtgtcgagggcgaaaccaagacgttcgcctcgcttgtcatggatgccacgttcgccgccgccgtgcgcacggagctcgccgccgcaggcgtttccgaggctgtggccgagaagtccatggcgtatgccgagaagaacgcgctcgccgatgccgatcgtacgacgttccaggccatggaggctctcatccacaacctcaacaccatgcattcgcgtgccggcgcgcaaacgccgttctcttctgtgaactacggcatggacacctctgccgaaggtcgcatggtcatcaagaacatgcttctcgcaaccgagcaagggctaggctcgggcgaaacccccatcttccccgtgcagatcttccgcgtgaaggaaggcgtgaactacaatccgggcgatccgaactacgatctgttcaagcttgccatgcgctgctcggcaaagcgcctgttccccaacttcagcttcctcgatgcgccgttcaatgcgccgtactacaagggaacccccgaaaccgagatcgcctacatgggctgccgcacgcgcgtcatgggcaacgtccacgatcccgaacgcgaggtgacgccgggtcgcggaaacctgagtttcacctcggtcaacctgccgaggctcgccatccgctccaagggcgacgtcgatctgttcttcgatctgctcgatgccaagcttgcgcttgccgtcggccagcttgacgagcgcttccagattcaggcgcgcaagaaggtgtacaatgcgccgtttctcatggggcagggcgtgtggatcgattccgaaaaactgaaatcgaccgacgagctgcgcgaggtgctcaagcacggcacgctttccgtcgggttcatcggccttgccgaaactctgaaggctttgacgggcaagcatcatggcgaatcgcccgaggcgcagaggctcggcctcgagatcgtcggccatatgcgctcgtacctcgatgccatctcgcgcgagcgtcagatgaactacacgcttatcgccacgcctgccgagggtttgtcgggccggtttgtccgtatggaccgtgcgcgctacggggtgatcgaaggcgtaaccgatcgcgattactacaccaacggcttccatgtgccggtgtactgcgagatcaacgcgttcgacaaaatctccctcgaggcgccctaccacgcgctcaccaacgcgggccatatctcgtatgtagagctcgacggtgatcccactgagaacctcgaggcgttcgaggctgtcatccgtcacatgaagaacagcggaatcggctacggctcggtcaaccatccggtcgaccgcgacccggtctgcggctacaacggcatcatcggcgaccgctgcccgaagtgcgggcgcaccgaagaggagcacggcgtgcccttcgagcgcatccgccgcatcacgggatacctcgtgggcacgctcgatcgtttcaacgacgcgaaacgcgccgaggaatccgatcgcgtgaagcatgacatctaggccgctcgatggcgatagaagctagcgaaacccccgttgggagcatggttcccgacgggggttcctctcaagaacctgccaccatccgcctgtacggaaccgccgtcgattccatcgtcgacgggccggggctgcgattcgcggtgttcgttcagggctgcacccacgcttgtcccgggtgccataatcccgaaagccagccggcgtgcgcgggcaccgtcgaatccatcgattccctcgttgcctcgatcgaggcgaacgggcttgtgggcggcgtgaccctttcggggggcgagccgttcgagcagtgcgccgcatgcttggttttggcccgcaggctcaaagagcgcggctacggcatctggatatattcgggatatctgtacgaagatctgctcgaaggaagacccgatccccttgcgcccgatctgctttcatgttgcgatgttctcgtcgacggccccttcgtccaagagctcaactcctacgacctcacgtggaaaggctcgtcgaaccagcgggttatcgaccttgccgccagccgtgcggcagggcgcgtcgttttgtggcaaacgagtgacagttttcccgaagtgcccgcatcttggtagcataggggtatggaacaagatttcgacaaacttgaatcgttcgtccgcagcgaatggtttatcacggctctttcggtcgcggcgatccttgcgatcacagcgctcgtttcatggtttgccaccaagtttctccgcaagctgctccaacaggataattcgcttctgccttcgagttcgatcttcgtcaacatagcccgtgccgccgtgtggatactcggcgtgtgcgtgatgcttgccacctgcttcaacgtgaacgtgagcgcggccatcgcggcgcttggcgtcggcggcatcgccatttccctcgggtttcaggatacgatctcgaacctcatcggaggtttgcaggtcagcctcatgaagatcatccagccaggcgataacatcgaggtcaacggcgaaaccggcgtggtgaaagacgtcacatggcgccataccactatcgtgaaccctcaaaacgagacggtcatcatccccaattccatcatagggaagaacgcgttgacgaagctcccgcccaccacgcttatcacgatcaagttcgtcgtatgctccgacggaagcgacctcgatacggtggcggcagccatcgaggcggcatgcgacaaggcggccggagccgtgacgagggtgacgcagaagcccaaggcgatattcaccgaagtgacgggcttgggattttcgggtaaagtaacgtttaaggtagcgagttcgtcgaaggcgggggaggcgaacgacgcggctgttcgcgccatcgcgccgataacgcgctcgtccgaaacccggcagagcgcgtaggccgggcatacgactaggaggaagcccatgcaggaacaccgtatcgtttcacaaggacctctccataatgccgacggctcgcttgccgagccggggtatgccacagcgcttctcctcaattacaaccggttcaaggttcgggctcccaagcatcggatcaaagagtgggattattatctcgttaacgacgacgagtacgccgttgcgctcacggtgggcgacttgggctacatggggctcatatcggcttcggttgtcgatctggttgaatgctggtacaaaacgacgagcgtcatcactcctttgccgcttggccgcttcggcttgcccgagcattcgtccgaaggcgtaaccgaattcgagaacaagcgcgtccaccttcggttcgaagcgaaaggcggcacgcgtacgctccgggcgcgtttcgatcggttcgacggcgacgagccgcttcacatcgatgcggtgcttgatgaggagccgcgcgactcgatggtcatcgctacgccatgggccgaagatccgaaggcgttttactacaaccagaagatcgtcggcatgcgtgcccagggcagcttcaggaaagggctgctcgtccatgggtttcgacccgacgattcgttcggcctcctcgattggggccgcggggtttggacgcgcgacaacacgtggttctgggcggtggctcaggggtggcaggacggcaagggcaaccgcacggtcggctcgcatcggttcggtttgaatctcgggtacggcttcggcgatacgtcggcggcgtctgagaacatggtgttcgtcgatggcgtggcccacaagctcggccgcgtcgatttcggcatcgcggatcgtaccggcgcctccgaaaagaacgtggagcgcaggttcgatcttatggcgccctggcatatgaccgatgacgagggacggcttgatcttgtgttcaccccatcggtcgaccgcaaggattacataaaccttgcgttggtgataaccgatcaacaccaggtgttcggcacgctttcgggcaaagtcgtcctcgatgacggcaccgagttcgttgtggcgggcctgcacggttcggccgaggtcgtgcgcaacaagtactgatgctggccgggggtttccggctgcaagcgctgacggttcgaggcttcatacggcaagtgccggcaaaaggcgaagcggcctgggcaaaaaggctgtcgcattctcggccccctttcgcctgcaaggccctatgcggcctcgagcctacagcccttcggctgtaaaccgagtcgccaacgcttcttggtggatgctgtactgcagagccatttccttcgcaacgcggccttgcttcaccagttcgaacaggctctggtccatggtcctcatgccctctttgccgcatgaggcaagcacgctgtcgatttggtgggtcttctcttcacggatgagattgcggatggccgtgttcgttaccatgatctcgaacgccggcacggtctcgccgtcgacggtgggcacgagctgctggctgacgattgcgcgcagaaccatggaaagctggatgcggatttggcgttgctgggtcggcgggaaggcatcgattatgcgatcgacggttcctgcggcgcccgtggtgtgcagcgtggagaacagaagctgcgccatctctgcagcggtgacggcggtcccgatggtttcgtaatcgcgcatctctccgagaagaatgacgtcgggagattcgcgcatagcggagcgcagcgcttcgccgtacgaggcgatatcggtgggcacctcgcgctgggtgacgatgcagctgccgtgcttgtgcacgtattcgatcgggtcttccatcgtgatgatatggcccgtgcgctcgtggttcagccgatcgatgatgcaggcgagcgtagtcgatttgcctgcacctgcaggaccggtgatcagcacgagccctttctggaactgtgcgcagcgtaaaacctcttcggggatgtggtagtcggcgggatcgggcagcccgaacggaatcacgcggatgacggcaccgtacgaaccgcgctggcggaagatgttggctcggaaacggccgacacctgagatcgcgaacgagaaatcgtcgtcgtggttgccgttgtttgcaaacaggctcatgtcgcgcccggaaacagcgtagatggcgcggacgaacgcctcggtatcgtcgggcgtgaatggcgcgtcgtcaaggcgaacctggcgaccgctgatctcgtaggacatcggcagccctgcgatgatgaagatatcggacgctttggcatcgaccatcgttttcaagagtttttcgagttccatcgcttctcctagcctttctattcggtgcccgtccacagggtttccgaggcaccctcgctggttgagggggtggttgccttccattgctctatgctgtattcgaggcgggcgtttatgccgagctcgatatcgagcgttctgccgctcggcgaggtgaacgaggccgagacggtggcttcgtcgatggaagcggctgccttcgtgtcgccatcgaccgcctgcacggcaagattcggcagctcgcgttcaagtgaggccatagcttcgctttgcgagcttttcgcatagcgctccctggcaagaaagccgtcgagtgcagccacgaatttctgggcggatgcttcgttttcgtaggtgtcttcagtgaacgaagcctgccgcgcggcgaccgcgtacgttgcctgagaagtcgtgacggcaagcactgccatgacggcaaggcacaatacgatgatcagcgtgagcaggctgatggggccgatgcgcacggagccgcgccgttcgttcatcgctgcaccccgctttcgtagcgcgccgtttcgagccggtacagctcggcgccgttggaaaagacgacgatggttgcccggtacagcgtgccggcatcggtcctttcgggttcgaccgtgcaggaaaccgaaagcccgtcttcggtttcggtggttccgccggcctgttcgggatcggcgctgaagcgctccgcggcattggcggcaagcacgacggccctcgaaagttctctgctttcgattccttgggcgctagccgcgccgaacagctgcatgaaaaccgcgatcgatgcgaggaagaacgcgagcagtataagcgcctcgatgacgaaagcggttccatgccacgatgatcctttgcgggtcgagcgcgaggcgctccggtagatgcccatggttaggcctccgagacgcttctcagcgcaacgtcggcgctgccctggtcggtcgtgatggtgagaagcccgttgccgtaggagaagtcgaaaacatccgatgggcagatgacaactgctttttcgggggtgtaggccgcatcggcaagcgcgtactcctcaacgatgttgccctcgtggcggtagatgcgcgtttcataggtgccgctgtcgagccgctcgacgagaacgagggatctgccttctggacccgttcccgccgcgatggcgtcggcggcatcgttggccctcacgttgttggcaagaagggtaaggcccagccgtgcttcgtcggctcccgacctgatatcgttgaggttacggtagacgttcgtgcctgcaacgacggcaagcaaaagcgctatgacgaagagggcgaacaagagagccgtgaacatatgacccgacgaacctgcggcctgcggtcttttcgcttcggaaaagggggcctgcgagagggctttcgtgatgtcggtgcgtttcgtcatcgcggcaccactacgacgcttggcgcgacgttgtcggcgaacgcttcgtaggtgactatgtactcgtcatgattgatggcgagtccgtacgaatcttccagatgctgaagcgaggcggggtaggagccctcgatggcgcagcactgcatcgcggaatcgaggatggcgttgcgtatggatgcagccccctgttcgcgcaggttcgcacaagcggcgttgtatccgagccagcagactgccgcgagcgccaccgcgattacggcagtcaccatcattcgcctgcgacggcgggagatcattgccgatgtctgctcgtgatacatggatgcctacccgatcgagctcatgatgccgatgagcggcagcatgaccgagacgagcgttgcccccactgcaatggttaaaaatgctgccagagcaggctccatgctatcgattacccgatcgatctgcacgatcgcatcatcgaagaacgtcgaagacaggctatcgagcacttcgtcggtgctgccggattgcgtacctatcttgagcatgcgggcgtagacgggttcgagcacgttgttgtcgccgagtgcctgggcgaggcttttggcattgtcgagatcgatcatcgagctgtaggccgcctgcagcttcgctttgagcttgggatgatcgaccatttcaagcgcgttcttcatcgtcgtgtcggcatcgacgcccgaggcggtgtaggttgccatgacggaagcgaatcggctgaccgcgagctggtacatggcgcggctggtaaggggcagcttctgaaaggcgccgatcacgaaattgtgtcccgaagccgtgcggcttgcgatggccccgacaagcgcgatgatcgtgcaggcgagcacgatggccagggctatccagccgatcagcaaagaggcgttcaccgaagagaaggagcctgccgtcatgcttccggataggctttcgaacacctcgatgaaaacggagaggatcaccgcgaccgtaaaggcgaggatgacgctcatgatgcacagaagcgcggcgggatagctgatgttcgagcggatgcgttcgaacaggcggttttcctcgtcgtagtacacagccaggctgcgcagcacgttttcgaggcgccccgatgcttcgccggttgccaccatgtcgacggcatagcgggggaacgatcccgcatccttcatggattgagcgagaggcttgccggcgatgagccccgcgtacacctcgtcgcagctgcgtttgagcgttgttgcgcccatgttctcgccgagcatgtgaaccgcttcgtcggtctggatgccggccgagagcattatggcgatgctctcgcagaaagagctcagagcactgctttcgagcatggatgctgccatgtagatacgctcctcacctgttgccatcgctctcgggcgatgcaccgctcgttgtcagtacgtatagcggtcggtgtaggttgtcccatctccgacatatccgctcgcgccgcctgcggctgcgaacgtaaggtctattcgagtccaagtgttcgactcaacgattacctccgcactcacccaactgccattaagatataccaaattccatgcatggtaaataccatcaggggatacatatcctgtgattattttgcagggaatcccaaggctgcgaagcattgcagcagctaaagaggcgtaatcgaaacaaatgcccttgccttgagcaatagttgaatcagggtcgggaacgtagccggtggcatcggcgagcgcgatggccttctcggtgtcgtaggcgatgttgtccacgatccactcgtaaaccgcacgcatgacgtcgccctcgttggtcgcgccggcggcaagttctttcgctttggcgacgcaggcgctctggtcggtgtaagagcaaaagacgttcggtcgcaaaaacggctcgaactccgaatcgagcgttacatcggctgcggtcgagtaaagctcgacgtagttgttgccgctcgtgttctgcatgacgcgaaaggtgtaagcgccatcgcccatgttgagcgggcagacaagaggcgccccgtcgccgtccaaatcgtagttgtagctcatatcgccttggattacctggaatttgagtcggctttcgctttcggcggatgccgcgacgtatccctgcgcaagcgacgaggtgtcgatgaccgctccgttttcgcctgtagcggcagaagcatcgaaagcggcggtcgccatggtggggatctcgtaggcgggtccattggtcgtgccgtctgcattcgaggcgctgccgggtgtcgcggcatcttcggagccgcatgccgtaagcgaggggagggcggcaagtgcaagcgatagcgcaagcaagagggcgagcgtcgtccgccctgccgcgcgaggcgcccggcgcgccgggcgctgccccgcaagacgagcgtggcgtacggcatggcaagcgctcgcctcgatgggcatgatcatcgaggcgagttgtgcggcggggtgcgttttccggacgcgtttcacggaggcctttctcgcgttgtcgtagagttcgcagtatacagcctaatgcgcgatgcggttgcggatatatgggttctgccgttcgcaaaagtggccgaatgcgtgcaaaatgcacggaacgtaatccctcacctgcaatgttgcaaaattagcatcaattatatgttgaagaataatatataagtaaaaagatggtataattttaacgggttttacctgtcctcgtgtttgttggtacgacggattgggatcctaccatgtgcacggcgcgaacggcatatctgaaaacgtatgagcgaatcgaaaacggctaccagcttaaggtaagaaaaggctgaggattcggtgatacgtatgggtatgtttgaggcattcggcaacgcaaagaacacggtacagggcaaggcgctcgcggttttcatatcgctcgcactggctttgtcgttcatcaacgtttcggcgtttgcaagcgaaggggaatccgatcatccggatgcgcccgtcgtacaagccgaaagcgcagccgataagccagctgccaatccggaggcggacgatgcggcggccggggccgaagagcccgcgactgcgaccgagcccgagacggctccgtccgagaaagcccctcggattgaatccggttcggggggggggcgcaatcaccgaaagcggttcctccgatgccagcattgcgctcgagctgcaaaacgcttctatcgaatacctcgaccagcgcatctcccttcccgccgatcgcgtcgattatccgcagtccagggaattcaggttcaaggcatttgccgaccaaggttacgaactcgaatccgtggcgatggcggtcgatggattcgagaccgtgctcgaacccgacggtgaaggtttttacacaatcggagcgcccgccgtcgcaagcgggcttactgttaaggtgaaggcggcgaccgccgaagatttctccggtgccgaatccgaagatccgtctgcaactcccatcgattccgaaacggttatcgagcccgaaggcaatgccgccgcctcaggcgaggtgggcgggagggccgccgagggtgaaaccgttgcgggcgaagaggccgttgcggtcatcgctgatgtgagcagccccgcattcgaaggatacgcgtacgtcggaaacatcatcgtgaaggtgaccgccggcgaaggggcgcttcccgaaggagctaccgtgcaggcttccgaagtcgaacgcgaggatgtggccgaggccgtagcttccgaagtcgaaagccggggcaagaagctgcaggacatggttgccatcgacgtcacgctgcttgatgaagacggcaatgccatccagcccgaaacccccgtcaacgtttgcttcttcgacgccaacgtggaaggcgaagaggtgggcgtgtatcgcgtgtccgacgacgcttcgacggttgaggccatcggggcccgtcaggccgacgcagccatccagagcttcgatgtggaccacttcagcatttatgtggctgctggcgaagcgtctcagttgggcagggcttcgcatagaaactccctgagtggtaacaccctgacgattggcaataactatgcgagcggaatgacgacgtcgctcggctcgtggtctcatgcgttcaacgtcgatagcggagcggggctttccgatgaggctttggcatccgatttggccgaagagttcatcgatgatctgggtggcggctacttgttcgaaggggcatattacggggacatccaaatcatgcggttatccgtcgacgattggcgtggcgcgctatggtacagtacgcaggactcgggctatgactggaagagcatacctgcatctagcgtggcgagcatcgccttctactacagcgcagctgattcaacgaattcgccgtccgggccttcgcttacgcttgacaaaagcagtttgaccattgcggtcaacagcacggcaacgatcaaggcgactactgtgccgtcgggcaaatcggtattgtggagttccagcaacacgagtgttgcaacggtatccagcaaaggcgtggtgacggcaaagggccttggaaccgccgttgttaccgcgtcaatgaccgtgaacgggactagatataccgcttcggcgactgtgaacgtcgtacgcgatagccagggcgacactgtgcagaatgcctacttctatctctggattcccggagcgatcgagggggcgcaatatcaggacacgtggttgtatgcgggtttggggcagatcacggctccgagcaatctttttcaatacgcgagtcccaaccagataaccaacctcaatggcgtggtgaccgattcgggcgttcccgattatttcaaaacaaagaaaattcaatatgagggccatctgtatacctatagcgcatcgggggagggcgattacacgttcacggtggtttgggactacgccgtcgcctcgaacggtgcgaacgacggccgtaattggtatggagaaaacggtcaaaacacgataatttacccgtcgggcccgaatgtaaattgctggcatgtggatggccacgtgatcctcaataccccggagaaggtcactgttgattttcaggtgcagcagcccggaagcgatgggttcgcttctacgggaaagccgtatcctgctaccatcagcaaaggtacggccttgtcgtctatttcgattcccaatcaacccgagaccaaaatttacaatggcatcacctataacttcgatgggtggtactacgaccaggcatgcaccaaacgcgttgatttcgccaccggaaccataaccgaccatacggttttctatgcgcgctatattgcccagttcgtgcaaacgataagcgttgacggtgcggtggttgacacccagacagtcgagcaaggcggaagctgggttgaatatgaatatgaagcacctgatgggcgtcatatagcatcggtttcgataaacggcgtggagcaaaagatcgaagagggtcttacttcgtataccactgatgctcttaacaacgtcaaagccggtcggaccatcgagatagtcacggaagccgattcttacgccgtgtcctaccggttcgcctccgacaccgcgggcatgaccctgcccgccggggtcaccgaccagctcggccaggcgtcggtcacgagcgcctacaagtactccacggtcgaaaacgagttctgggccgaggcctacgagcccgtcgaggtcaccgaccccgacaccggcgcgctgcaggggacctggaccttcgcgcccggctgggacaaggagcgcgcctaccgggtcgccggggacgtggcgttcaccggccactggacctacaccgaggccgaggcgcccattcctcttccgacgccgacgcccaccgacacgccgacaccgacgcctgctccggcggcaacccctgcgccgggcgtgctgcccgccgatgatccggtcgcgccgattgccggggctctcgctgatctggctgaaaccgtcataggcgaagacgagactccgcttgccgaaagcaatatcaacgatgacgagacgccgcttgcaacgttcgattacgttcactgctgggtgcattactacttgattctcggaatcatccttaccgttttgtatggcgccggcgtcctgattcgccggatacgcttcacgagcaagctcaaaggatacgaagacgatattctcggcatcgacgagggcggggtagccgcaccttccgccgcaccggtggcgacggaaggaaaggaggcttagcatgaaaaagagcaactggatcatattggctgttcttgccgtagcatgtgggttcttcttgtggttgtggtactacctggatttcaaccttgtcgatgatccgcttgatttgctggtggccatcgcgtggtgggctgtcgtggcagccctcgtctttggcattcgctttgtcgagaaaaggcgcgaggagcgcatccgcacggcgttcgtcgcgcccaacgcgcttttcaacagcgaggctgggtttgtaatgctcggtggcggggaatctcccgtgatggctcttcagcaagtgctcaaagagttgaagtaccatttcgatcgcgccgatttgcccgaaggggagcgcgcatcgttcgtctacatcgttcggacgaagaagttcgctgagggaggcgatgcttgggagggcgaggtggtcgtcatcgatcgctccgacagcgaacctctgccgtttgccaaccgcgacgagttgctcaacatcgtggaaggcgtgccgctgccgagcgacacgccttccacttcgtcgatgggttcgggttctgccgtgactgttcccgtgggagcctaaggcgttcgagagatcgatcgataaacaagaaaacgagccgcgtccgatgatgcggctcgttttctttggctcggtcgagccggctagtcgtcaaccccgatcatgacgctcgacgccttgatgacggcgtagacttctttgccgacctcaagctcgagatccttgagggatcccatcgagagggtcgaggtgatctgctcgcctcctgcgagctccatgatcacgatggcgttcaccgctcccggatgaattgcaacgatggtgcctttgagctggttgcgtgccgatagcttcatgtttgattcccctttcaaacgccttgcatgaatccattgtaacggtaagctgcggtttctcaaggaagtcgtcgattgtttctcaaaaagccgtccctttcgctgtttttagcaaaactttactcagatttgacgaacgccgaacaggcatttgatcgaggcgcgcgactatggttgcagcacgaaagttgcagtacaaaacgaaaacaccaacggttcaacggtttgataggtttgaaaggaaagaaatgaaaaagaaggttatcggggttttgatgtgtgcgctgcttgcgttcggcgtcctgggctttgcgggctgtgcgggcggcggcagcggcgattcgggcacgagcggttcgggcgagagctcgtcgtcggcgagcgaaacgtcgccttcgggtcagatttcggtgtactcccgcgaagacgggtcgggtacgcgcggcgctttcgtcgagctgttcggcatcgaagagaaagatgcaagcggcgagaaggtcgatatgaccaccacttccgcctccatcaccaactccacgtcggtcatgatgacttcggtttccggcgacgagcgcggcatcggctacatttcgctcggctcgctgaacgacaccgtgaaggcactcaagatcgacggcgctgaagccactgccgaaaacgtgaagagcggcacctataagatcgcacgtcccttcaacatcgcaaccaaagacggcgcgtccgatgtcacccaggacttcatcgatttcatcatgagcgccgagggccagaaagtcgtcgaggatagcggctacatcgcgatcgacgatgcggcggactcctacacggcttcgggcaagagcggcaaggtcgtcgttgccgggtcttcctcgatctcaccggttatggagaagctttccgaagcgtacaaggcgctcaatcccgatgtgaccatcgaggtgcagacctccgactccacgacgggcatgaacatggcgaccgagggaacctgcgatatcggcatggcttcccgcgagctcaaggattccgagatttcgggtggcctcaagcccacggtcatcgctcaggacggcattgcggtcatcgtcaacaagggtgcttcgatcgacgagctttccagcgagcaggtcaaggccatctataccggcgaggttgtcaagtgggaagacgcgctcgcctagtgcggggcgttttctcggccaccagcaacggagcttgacgcaatggcgaaattacacataaaagaaggcgtggcgaaggcgttcttcatggttgccgcaggggtttcgatccttgcggttgcccttatctgcatcttcctcttcgcaaacggcgtgcctgccatcgcccagatcggattgcctgatttcctgttcggaacgacctggcggccttcgaacgatatctacggaatcttccccatgatcatcggcagcatttacgtgacggctggcgcgatgatcgtgggcgtgccgacgggcatcctgtgcgccatcttcctatcccgtttcgcgagcggacgcattgcccgggttctcaagccgggcgtggaactgcttgcgggcattccttcggtcgtctacggctttttcggactcgtgatcgtcgtaccgttcattcgtgcgacggctcccgacggcaacgggctctcgcttctcgcagccgcgatcattttgggaatcatgatccttcccaccatcatcacggttgcgcaaagcgcgctcgacgccgttccccagaaatactacgaaggggctttggctttgggcgccgatcatgagcgcgcaacgtttcgcgtgctcgttcccgcagcggcttcgggcatcgtcgccgcgatcgtcctcggagtgggcagggctatcggtgaaacgatggcggtcatcatgatcgcgggcaatcagccggtcatccccgagagcatcttttcgggcgtgcgcaccatgacggcgaacatcgtgctcgaaatgggatacgcagccgatctgcaccgtggtgccctggtggcaaccggcgtcgttttgtttgcgttcattctgctcatcaccatgctgctcaacgtgatcaagagaaggggcgaggtgaaatgacgcagaatacgactatcgtctccgaaacggcctccggggcatcgctggatacggcgtcctcgggcatcggcgcctccgcgcgcatcgaggccatgttcgccgaacgcgaggcgacgcatgcgaaaaaccgcgtgatcgtctcgctgctgcttcgcttgctcgtgtacctgggtgcccttctgaccgcaggcgtgctcgcgttcatcgtcgggtacatcctcgtcatgggcgtgccctacatcacgccgagcctgttcgaatgggaatacacctctgaaaacgtgtcgctcatgccggcattggtgaacacgctcatcatggcgggcctttcgcttgcgatggccgtgcctctaggtgtgggatctgcaatctatctggttgaatacgcgccgcgcggaagcaggttcgtagccgttgtgcgcacgaccaccgaaacgctccagggcatcccctcgatcatctacggcctgttcggcatgctgttcttcgtgacggcgctcaagtggaacctctcgctgctcgccggggcgtgcacgcttgccatcatgatcttgccggtgatcatgcgcacgagcgaagaggcgctgctcgcggttcccgatgcgtaccgggaaggcggttttgggttgggggcagggcgtttgcgcaccgtatttcgctgcgtgctgccttcggctgtgcccggtatcttgggcggcgtgatccttggcctcggccgcgtggtaggggaggttgcggcgcttctcttcacggcgggctcgatcgctcagattcccggcttcgccaccgagggtatcgccgcggtattcgattcgacgcggacgctcgccgtccatatgtacgtgcttgcaagcgaagggctgcatatcaacgaaacgtatgcgactgccgtggtgctgcttgttctggtggtgctgctcaacatgttcgcaacgtttgccgcccgcaggatgaaaaaaggaaacagagatgactgaagtattggttgaaaagaagtctgcaaaccaagaggtccaggtggacggctcgatcgcctaccgtccgcatatcgaagtcaggcatgcgagcgctgcgagcgtttcggatgcgaacgccgccccgaaaatgggcgtgtacgacctcgatctgtattacaaagatttcaaagcgctcaagcacatcaacctcgaatttcccgaaaaccaggtgacggctcttatcgggccttcgggctgcggcaagtcgacgctgcttaaaagccttaaccgcatgaacgatctggtggaaggctgccgcatcgagggcaagataacgctcgacggcaaaaacgcctaccgcgatgtcgccgtgaacgcgctgcgccgtcgcgtcggcatggtgttccagcagcccaatcccttcccgatgtcggtgtacgacaacatcgcgttcggcccgcgcacgcacggcatcaagagacgcgaggatctcgatatcatcgtcgagcaatcgcttcgcgatgcggcgatctgggatgagctcaaggaccgccttaagaagaacgcgcttggcctttccggcgggcagcggcagcgtttgtgcatagcgcgcgctttggcggttcggcccgaggttctgctcatggacgaggccacaagcgcgctcgaccccatttccacgggcaagatcgaggaactcgtaggcgaactcaagagcaagtacacggtcatcatggtcacgcacaacatgcttcaagcgctccgcgtttcagataaaaccgcgtttttcctgctgggcgagatggtggaagcgggatcgaccgacgatatcttcacgagcccgcacgataagcgcactgaggattacgtatcgggtcgtttcgggtagaatagcgattatgatctactacgttgaagacgacaccaatatacgcgatctgacgatctacgcgctcaagcaggccgggttcgaagcggtcgggttctcgtgcgcctcggagttcttttccgcatgcgcaaaccgggttccgcggcttgtattgctcgacatcatgctgcctgaaaccgacggcatcgagatactcaagatgttgcgcgaagatcccgccatcaagcacgtgcccgtcatgatgcttacggccaagggcaccgagtacgataccgtgtgcgggctcgatgcgggcgctgacgattaccttgccaagccattcggcatgatggagctggtatcgcgggtgaacgctctcttgcgtcgcgcaggcgagccctcaagcaatacccaagatacgatcacctgcggaaagctgtccctttcggcttctgcgcataccgttgaagccgatgggatccccgtggagcttaccctcaaggaattcgaccttttacgagctctcatgcagaacaacggccaagtgctatcgcgcagtcagctgcttgaagacgtgtggggcatgacgtacgcgggcggaacccgtacggtcgacgtgcacgtgcagacgttgcgtcagaagcttgcggccgcggcgcccggcgtcgaagcgtgcatccaaacggtgcgcggcgtaggctactgcgtgaaaacgccctcatgaggcacccgcgatgagtccaacccatttcagcgtcaagagcctttccggaaagatattcaacaccgtcctcgttttcacgattgccgtcatcctggcgttctcggcgatcatcacggtgctgttctacttcagctacgaacgggaagccgaagcgtcgttggcagagcaggctctcgacgcggcaacgtacctcaacgaaactcccagcgacgagaacgtaccggctctgctcgcccaattcgccggccaagttcgctatacgctgatagcttccgacggcgacgtgctgttcgatagcgcctccgacgagggggaggctgaaaaccacggaaaccgacccgaggtgaaagaggcgctcgccgacgggcacggcagcgttttccgatattccgaaacccttaaaaccgatacgctctactcggctgtcaagctcgacgatggcagcgtgattcgactggcggagacccgccattcgctcgtggcgtttgcggcgaccatgatcgggccgttggcggttgcccttgcggtggtcgtgctgtcggtattcgtgctctcgcgattgcttacgcgccgtatcatgaaacccatcgatgcgctcaacttcaccgagccgcttgagaacgagatctacgaggagatggatccgctgcttgagcggatcgacgaacagcagcggatgctcaagcagcaaacgcgcgagatcgcccgggcggaaacgatgcggcgcgatttctcatcgaatgtaagccacgagatgaaaacgccgctgcaggttatttcgggttacgccgagctcatgaagaacggcttggtggatccggaagacaacaggaaattcgccggcctcatttacgaagaagcccaggcgatgcgttcgctgatcaacgacgtgctcatcctttcgcgtttggacgaagctgcggtaggcgatcgcgatcaggcgatcgatttgtacgctgtcgcccagtcggtggcgaatcgcctggtgtcgttttccgatgcggagggcgtgagcgtggtgatcgaaggcgagtcggcttgcattgcgggcaccgatacgcttgtcgaggagatgctctacaacctcatcgagaacggcatccgctacaaccacgaaggcggcagcgttacggtgagggtcggcaacgatggcgccggtccgatcgtgcgggtgtccgatacgggcgtggggataccggaagagatgcacgataaggtgttcgagcgcttcttccgcgtcgataagagccgttcgaaggaaacgggcggcacggggctcggccttgccatcgtgaagcatgccgtcatgtaccatggcgggtcgatcgaggtcaaaagcaaactcggtgaaggaacctcgttcattttgaggttccccgaaatggacgggggagcgagaggccgaagcgcggcaaccggccgctgatcgagcggacggattgcgcactgtcggatcgaggctggccgaaggccgggttcgatcgagagccggctggggccgggccgatgctgaaagagccgggtggaaacaaggctctcggggcggagcctgcgggtggttctaaactccctcgagcagatctgcgagcgcgatgccgagggccttggctatggcgagcagcttgttgatggtcgcgttggcgatgcctttttcgatttcgcagagataaccctcgttgatttcggccatgagcgcaagtctgctctgcgtcagattctgacgcttgcgctcttcggcgatcgcgcgtccgatcgcttctctttcggccaaaaattccatggtgcgaggctacggtaggcttctgggagcaactttggatataaccgaataattcggatataatagaaattctcttaagtggcttcgatcaggacagatgtcgaaaaggagtcggctatggcgaaaaacgaggttgagttcacgccgaacatggcaacggccgtcatcgatgtgcaccaccgcatcaccatgcatctcaaagaggagcacgggcttccgtttctgccctgctgcgtgctcgcgtcgctgagatcgcacggcggtaccatgctgatccccgattttccgtccgcgatgatttcgaacgagaacacggtcgtcgctgcggcgataaggctcgagcagaggggccttgtggagaaggcccgcagggaaagcgaccgtcgggttgttgtgctgcacgaaacgcccgaaggcgcggcgcttgtcaagcgcgcgttcgacggcgtgtatcggcagatgacgacgacggtgtggagacggtattccgatgggtcgatcgacgaggtgctgcaagcgttccatgcatcggcggccggactcgggataaccgatatcgaggtcaaccatgaggtgcacgaaaccttgacgcccgccttcttcatggcgatcgcatcgttggtgcggcaatggacacaggcggcatcgattgccgggagcacgtctttgacggaataccgctgccttgcgttgcttgaggatcggcgaaagccgctgccgtgttcggagctcgccgacacgctgctgatcgatcggagcacggtttccgcagcagtcaaatcgctgcttgccaagaggctcgtgcgggtcaagagggggaaagacgggcggcagcgcatcgtttcggccaccgaaagcgggaaggcgaacgcggctcgcgcgaaggccgaacttgaaaagcggacggcagcctgctatgccgatgcggctccgcagctcagggcgaaggccaacgaggtctatgcgcgtatgtacatcgaacttgtcgagtggacgggcgtcgaaggtttgctgatcgtctgaaaccatgagggtcgttcgccttgctgtatcgtagcctccataacaatgtaagaacttataatattgggggagatccgtcaaatcagcatgcggctctcgcgttgagggcgcagtattcgtcatgagggcaaacgcccgcgcgggcagttcggcgcttcgtcttgccgcgcgatgatagcggaatgcgcttgacggcggaaaggaccgacgcgcatggaagccatcgggggaaggtcgccttgccgtcgagccgcaccgcccgggctgcaatcgaaaaggcgcccgtaaacggacgccttctataagccccacccctggtctaggatgaacccacctcaaaaggtgggtgctcgcagccggcttcctggctttcgcatcaacggatgcgaatctccattccacctgctatcttgagctccctaaaagttagcatcggtccatcgcaaatgtgtgaccgaggagcagagcgtaccctgagtatatggttccttttcaaggaataaaagtcttgacatgaacctgtaatcttgcattcgggatctgcgccatgccatctccatgatgcgaacaaaagtttgtgtttgcgggcgtctcacgctacaatgggcggatggataatctgttcaccgaaatggaaaacgatgtgaaacggtcggtcgctccgctggcggtgcgcatgcgcccgcgttctctcgacgaacttgtggggcaggagcaggctgtcggtcctggaagctggcttcgcacggccatcgagcacgatgctctgagctcggtcatattgttcggccccgccggtacgggtaaaacctcgcttgcccacgtcatcgccgaaactacgagggccacgtttgtggaggtgtccgccgtcggcggtacggtttccgatctgcgccgagaaatcgatgcggcggaaaaacgccttacgatgagcaatctgcgcacgatactgttcgtcgacgagatccaccgcttcaatcgcagccagcaggatgcgctgcttcatgcggtggaggatcgcatcgtggtgctcgtgggggccacaaccgagaatccgttcttcgaagtcaactccgcgctcatctcgcgttcgcgcgtggtcgagctcaaaggcctttccgatgacgatatccgcgagcttttgggccgggctctttccgacgagcgcggtctgggagggctctacgagctcgaagagcttgccgaagatgcaatcgttctgcttgcggggggcgatgggcgcggcgcgctcacgacgctcgagcttgccgccggcatggtgaagcccggtacgaagaagaaacccgcagtcatcaaagaggaatccgtgcgagccgcgacgccgcaccggtcgcttccttacgataagaacaaggatatgcactacgacatcatatccgccttcatcaagtcgatgcgcggaagcgaccccgatgcgacgctgtactggctcgctcgcatgatcgacgggggagaagaccccaagttcatcgcgcgccgcatcttcatccttgctgcggaagacatcggcaacgccgatccccaggccctgcttgtagccgaagcggctttcaagtcggctgaggttatcggctatcccgaatgccagctcatcctggcgcaggccgccacctacatggcgcttgctcccaagtcgaatgcggcgtgcggtatattcgacgctttggctgaagtgcgcaacggccccttgcgcaacgtgccgaacaaccttcgcgaccgtcatcgccccggatcggaagactacggcgagtacaagtacccgcacaactatcccggcggctgggtcgatcagcagtatcttcccgatgggctcgagcggggatcgttctaccggcccggcgagcgcggctgggaggcgtaccgcaccgaggcggtttcgcgcgaccgcaagccgcgcgcgtagcgaaaacgggagcttgcgcgccgcgtttggttctgcctgctcgctcgcctcggttttccatcctttggccctgcgctttcttcatgcaggtaacatgacagaaacgcactatgaacgcaccatgaaaacggccttccttacatatagaatctactaccaacgtggtatagttgtgaactcgaactgcgaggaggagttcaatggatttcgctgaaatagtacaaatcgcgcttccggtcgtttacgtcttggtgggcgctgctctcgtgtggctcgtcatcgagcttgttcttacgatcaggaaaacgcgcaaaaccgtcgacgacgtgcaacgccagatcgagcctacgctcgccaacgtcgaggagatcaccgaatccctcaagcccgttgtggcgaaggtcgatccccttgtcgagcgcgtgtcgctgacggtggatgcggccaacctcgagatcatgcgtgttgatcagattctcgaggacgtcaacgacatcaccggctcgctctcttcagccgtcgatgcggtcgacacggcggcaaacgcccctctcgaacttgtgaacagcgtatcgagcaaggttcgcaacgtattcaaaacgcgcaaagccagtaccgaatcggttacgctcggccatgacaagaaggctccggcggccgagccgaagcacggcgttcgcgaggagaagacggttgccgaaaccgcgcaggataccgtgagggctgcaggcgccgttgcccaagacgcggtgcatgttgcgcgcgacgttgcgcaggcggcaagcgacggggccgacgaagcccacgagcgcacccaggagcgcaaggcggaacgcgaggctgcggccgccgagcgcaaagcggcggcggataaggccaacgacgccgcttcccagatggccgatgcggtgcatgccgttgtcgaggcagacgcttcggctgcgaaggaaaagtacttcacctacggcaacgacgccgcttccgcgcccgcgaccgaagcgaaatagccgctcccatgcgcaaagcagacgccgcgctcgccgacgatgcgagcgaagagacgcccgagcgggagcggatgctgaaggcccgcaagcgctactatcaggtgtggaccgtagtcgccgctatcttgctcaccggcgttttcgcctatctcatgaacgtgctctcggtgcccgtgggcatcgtcgtgtggacgtgcataatagtattctgcctgcgcacgcccgtaaaccgacttgaaaagctcggtttgaaccgcggcataggcacgaccatcgcctacgtgctcatgttcgtcgtgctcatagggctcggcgcgctcatgttctcgccggtgttcggcgtgggcgatcagttcatgaatctcgtccagtcgatccctacgtacgtgcagcagatcaccgattggtacaacagcgtctatccgcagtacgagcatttgttccaaaacgatttcgtgaagaactggatcaacgatttgacgagctcgctcggcggctgggcaagcgaaacggccaaagtgagcgccgagggcatcgttaccgtcggcggcacgattgcgaacagcttcatggtgttcggcttcgcgatggtcgtggcgttctggatactcatggagttgccggccctggggcgcgagtgccgccgcctcatcggcaccaagcacaaggaagacgcggagatgctccacatcacgttcacgcgcgtgatgggcggctacatcaaagcgacgcttgtgcaatgctttctcatcggattggcctgcggcatcgcgttcgccatcatcggggtccccaactacgcggcgctcggcggcatcacggggcttctcaacatcatccccgtggtcgggccgtggctcggaggcgcgcttgcggcgatcgcctgcgtattcgtgagtccgcttgtggctctgatcgcggttatcgtgaccatcgccatccagcagttcgtgtacacgttcgtatcgccgaagctcatgtcgaactccgtcgacgtgcatccggcgcttgtcatcatcgccctgcttgcaggatctgcgatcggcagcgcaatgagcggttttatgggaggccttgtgggaatgctcgcttcgatccccgctgtggctgttgcgaagtcggttttcgtgtactatttcgaaaagagaaccggacggcgtatcgttgcgaaggacggggtgttcttcaaaggcacgccgaccgagaaggaaggcatgctcgtcgatccgcttgccgatatgtcctcgccagagggtgcgggcaggaggagggctcatcggcgcgagcatgcaaggggaccgaaaggttccgccgaacgggagcagggtagccaagacggcgagccgcctgcgagccaaggcgaaaagcccgagtcctcgcagggcagcgggtctgccggaaacgaagacgactgatatcgagaaagagtacgaacgacaatggaatacatgagcactgctgacatccgcgaaaaatacctgcgctttttcgaggcgaagggctgcaaacgcatgccttcttcctcgctgatccccgacgatccgtcgcttctgctgacgagtgcgggcatggtgcagttcaagccttacttccttcagcaaaagcatcttgaagctccctatgtcggaacgacgacggctcagaagtgcgtgcgtaccaacgatatcgatatcatcggcactacgggccgccatctgagctttttcgagatgctcggcaacttcagcttcggcgattacttcaaagaggaaatgtgcgcgtgggcactcgaattctcgaccgaggttttaggccttccggtcgagcgcctctacttcaccgtattcaccgatgacgatgagaccatcgaaatctggaaatcgctcggcatccccgaggagcgcatttcgcgcttgggcgaagaggacaacttctggcgcgccgggcctaccggcccgtgcggcccctgctccgagctgtattacgaccagggtcctgaattcggctgcggcagccccgattgcgcccccggatgcgattgcgaccgttatcttgagtactggaacctcgtgttcacgcaatacgacggccaggaggacggcacgctcgtcccgcttccgaaaaagaacatcgacaccggcatgggcctcgagcgcatcgccgccatcatgcagggcgtccaatcgaattacgagatcgatctcatgcgcgatcttctggcggtgggcgagcgcttgacgggcaagacctacggcgaaaacgccgaggacgatctgagcctgcgcatcatcgctgaccacagccgatcggtcaccttcatgatttccgacgggatccttccctccaacgaggggcgcggctacgtgctccgccggcttttgcgccgtgcggtcatgaaggggcatctgctcggcatcgaaggcacgttcttgaacgaatacatcgacgaagtcgtgaagctgatgggcgacgtgtaccccgaaatcgtagagaatcgcgaactcacccgtcgcgtcgttctttccgaggaagagcgattcggctccacgctgcgccagggtcaagcctatcttgacgaagcgctgtccgaactcgacggcgacgtgctgtcgggagaaaccgcattcaccctgcacgatacctacggattcccgattgaggtgaccgaggagataacgagcgcccgcggcatatcggtggatctcgacgggttcgagcgttccatggccgagcagcgcgcccgcgcccgcgccaacgccaaggatgccgacaaggcatggtcgacttacggcggcgtcatgagcgagattctcgaagaggcgggcccgaccgagtttttgggctatgcgaaagatgcctccgacgtgaccgtgctcgcgctcgcccaggacggcaagcgcgtaagcgagctttccgctggcgaatcgggcgagatcgtctgcgataaaacgccgttctacgccgaaaagggcgggcaagtcggcgatgagggcacgatggaggcgccgggcgtttcggtgacggtcaccgatgcccaggagcccgagaagggcctgatcgcccattcggttaccattgaggagggcacggtgcgtgccggggatgttctgcacgcggccatcaacgtgccgcgccgcgagcgcatccgtcgcaaccatacggcgacccacatcctgcattgggcgctgcgccaggtgctcggcgagcacgtgaaacaggccggcagctacgttgccccgaacaggcttcgcttcgacttcacgcatttcgagggcatgaccgccgagcagatcgccgaggtggagcgcttgtccaacgaaaagatcatggaaaaccacgccgtgcgcgcatacgagacctcgatcacgtcggcacgcgaggcgggcgtcatcgcgttgttcggcgagaagtacggcgaattcgtgcgcgtgctcgatatcgagggcgtctcgcaggagctatgcggcggcacccacgtgtccgccacgagcgagatcggcttcgtgaaggtgacaagcgaatcgagcgtgggcgcgaatctgcgacgcatcgaggcggtgacgagcttcgacgccttggcgtacatgaacaaggtggaaggcgagctcaaggaaaccgccgccgaactcaaggttccgatattcgatgtgagcgaacgcaccgccgctaaccttaagacgatgaaggagcttgccgacaagcgcaagcataacaagcaggccgcgactgacggcgaagtgctcgcagtgctcgaaaacgtactcgacgccggctatccgttggtcgttgccaacatgggcaccgtcgatgccggcgggttgcgcaatgcgtgggatatcatccgcgctcgcatggccgcgccgggggccgtcgttttggccgccgataacgacggcacgccgatcctgctcgcggcgggaacgcccgaagcggtggacgccgggttcgatgccggcgccgtcatcaaggcgatatcgcccgccatcaagggcggcggcggcgggaaggccgctatggcgcaggcaggcggaaaagacgtcgctgggctcgacgaggcgcttgacaaggcccgcgccttgctggtcaaggcgtaagaggacggtttccgaacgcgatgaggatcatggcgcttgatatcgggcaggtgcgcatcggcgtggccatcagcgatccagctgagaaggttgccacgcccgttgcggtgctgcccgcagccgaagtcgtcggctatgcgacgccgtttcgccgcctgctcgaagattgggagcccgagctgttcgtgtgcggattgccctatacgatgggcgcccaagagggcccgcaggcgaagggcataaaggccacggccgagaaaatcaccgatgcaacgggcattccccacgtgttcgccgacgagcggctaagttcgaaggaagccaaacggagtttgcgtgaaaagggtttaggcgaacgggaaatgcgcggaaaagtggatatgatagctgcgagcttattcctccaagcatggctcgatgctcgccgtgcttaaggcgcgcccttccggcgctttagcccaatagaaaggttttcgatgacccctcgtaaacaggtcacgtattcgagccgtccgaaccatgctgcacgtgcggcgcatcgggcgggcgaacgccagttcaagacctatgacacgagccacattcgccccaaaaagagcaaggctcccatcgtgttcgccatcatcctcgccatcattgtgatcggcggactgggctggggcggctatacgcttttcaccagctgctccgcttcccaaacggcggccgagacgcttgccgagggcgaaagcgttacggtgacgattcccgaaggctcgggtgcgcgcaccattgccgagcttttgctggataacaaggtcatcggcgattccaccgaattcgtgaaccgcgttaccgagggcgggcatgattccgctctcaagcccggcacctatacgtttaccgggcctctcacgctcgacgaggtgatcgggcagttggtgagcgggccgaacgcaaacggcgtatcgctgacgattcccgaggggtataccattgcgcgtacggccgaggccgttgccgaggcgacgggcggttcggtgagcgccgaggacttcacggccgctgcgaacaatgcgacggcatatgaggccgattacccgttcgtggcgggctcctacaacggctcgctcgagggattcctgttccccaagacatacccgatcgagggggatgcgacggctgattcgatcatccgtcagatgctttcccagtaccagaccgaggtcgcttcactcgattattctcatgcggaaggagccggcttgtctgaatacgacgttctcaagctcgcgtccatcatcgagaaggaggcggcggccgataaccgcgcaacggtttcgtccgtgttctacaaccgccttgcgatcgacatgccgctgcagtccgatgccactaccgcctacgaggtgggcagggaaccgacggccgacgatgtggcgaccgacggcccgttcaacacgtacacgaacaacgggctcactccatcgcccatttgctcgcccgggctcgagagcatccaggctgcgcttgctcccgaaacgacgaattacctgtacttctacttcgtgcccaacgattcgggcgggttggattactacttcagcgaaacctacgacgagcatcttgccgctatcgccggcgcgtaggccctgcggcggattcggcggttgtccatgtcctttgtcgagcctgaaaggtacttctcccgcatctcgatgatcgatatccaaaaggatatcctcgatgcggggtttacccatgtgctgcttgatatcgacaatacgattctcacgcgagatacgcacgaagttccgcgcgacgtgtcgttttggctgtcgaaggcgcgcagtgccggactgacgttttgcctggtgtcgaacaactggcacgaaggcgtctacgatttggcccggcggctcgatcttcccatcgtcgctaaggcggtgaagcctttgccgcctgcgttcctcgttgcccttcgcaagatcggcgcgaagcgcaagaccacggttatgatcggcgatcagctgatcaccgatgtgctcggggcgcatttcctcggcatgacggcttacatgctgcagccgcttgtcgagcaggacctcaagcacacgctgctgcttcgcaacgtcgagcgggcgttcatgggcgatcgcgagcccgaaggcgcctcggtgcaggctgcagaagagctgtctgacgagtcgagcgcacaggcgattaaccaaggatagggcgaaaggatcgctatgggcgagaacctgtatctgctcggtcatccgatcgggcattcgaaatctccgatcatgtacaacgcactgtatgaaaagctcggattgccgtgggcctacgagccgatggactgcgtcgatgccgacgaagcgcgcgcatttctcgacgcgcgggaatttttcagcatcaacatcacaacgccctacaagcccctcgcgttcgaggcggcaaccgtgcgcgccgctacggcgaagcttgcgcgcggagctaacgtgctcgtgcagaagaacggtgcgcttatcgcctacaacgtcgatggcgaggggtgcgtggattacctggagcgggccggggttcgcttcgcgggcagccaggtggtcgtgtgcggcacgggtccgacggctctctcgatcctgcatgcctgcgcccttgcgggggccaaacgggttgtgctcgtgggccgcgacaaggagcgggcgcgcgcgactctcgaggcgtatgtcgagcaataccggacgctcgctttcgcgaccgtcgatccgccggctgcgcgcgagggacggctgagctttcgcgcagcctacgaacaggttgatttcgctttcgggggatacgcttcggcgacacaggttttttcggcggcggatgttgtcatcaatgcaacgccgctcggtatgaccgagggcgatcctgcaccgttcgataccgccttgctccgtggggggcagactgtgttcgatgcggtgtacgggcatggaaccacggcgcttgtcgcaggtgcgcaaaaagccgggtgcgccgtgttcgacgggcagggcatgctcgtcgcgcaggcggtcgccacggcggtcatgcttctggaaatcgcgggggtggaaaccagtctatcgcgtgaagagatgttcgacatcatggccgacgccgcgggattcgctctgtagcggtataatcaccttcgaaagaacgccgatcggcgccaaggcgacctgcatgatcgggaccgaagccaggagaagcatatgcactacattacagcgggagagagccatggtccggcactgacggctatcgtcgatggcgtgccggcgggattgaaggtatcgcttcgccaaatcgatagcgacctcgcacggcgccagtcgggctacggacgcggcggcaggcaggctatcgagaaggaccacgccgaaatactgtccggcgtgcgtttcggaaaaacgcttggaacccccattgcgctgcagatcagaaacagggattgggagaactggaccgagcggatggctccgttcggcgacgtgcccgacgaactggtgcgcgaggtgacgccgcgtccgggccatgccgatctggtgggcgcgctcaagacgaacaccgacgactgccgcaacatcctcgagcgcgcgagcgcccgtgagacggcggcgcgcgttgccgctgcgggaatcgcccgcgagtttctcgctgatctgggggtggagatattctcgtacgttacgcgcatcggttcggcaaagttcgccgaggacgagccgatgcttgccgcccccgactacaagccgctcgacatcgagatgagcgatgtgcgttgccccgacgaagaggcgagcgaagccatgaaggccgccatcgatgccgcgcgcgacgcgggcgagagccttggcggcacgttccgcgtcgttgttctaggccttctgccgggtatcgggggctatgcgacgccttcggagcgcctgacttcgcgcatcggagccgcactgttttccatccccgccatcaagggcgtcgaattcggcaaaggtttcgccacggcatccgaggtgggctcgcgagtgcacgatcccatcatccaatcttcgaaggacgggttctctcgttcgagcaacaacgcgggcggtctcgaaggaggcatgacgacgggcatgcccctcatcgtaacggcggctatgaagccgatccccacgcttgcgaatccgctcacgaccgtcaacatggacacgctcgaggtcgaggaggcctcgaaggagcgcagcgacgtgtgcgccgttcccgcctgtgcggttgtggccgaaagcgaagtggcgtttgtgctcgccaacgcctatctcgaacggttcggcgatgcgaacatgactgacatcagggcggcggtcaaagcgtatcgccagcgcatcaagaccatgtcgcggtaggcggatacccgcatggcgaacaagaagcaacagcgtccgatccatcaagggccgccttccgaccgaggcaacgcgcagggcccgcaaggcaaaggttcgcctgcgcgggcgggcaagccgaaccgccaggctccgagcccgaaggctcaggcggggcgccccaagcaacgtacgcagccggcgcagaggcctccctgcactcttggacgacccgtgttcttcgtcggtttcatgggcgcgggaaagacctcggtttcgcgccgtcttgcgcggatgtgccgcatctcgtcgatcgacctcgatacttatatcgagaggcgggaggacaagaaggtcaaagagattttcgcagcggtgggcgaggggggatttcgcgcgatggaaacagaagtgcttcgcgaattcacagctgctgaacccgcgctggtatcatgcggcggcggcatcgtgaaagccgccgagaaccgcgaaattctcaagcgcggcggattcgtcgtgtacctcaaggtttccgctgacgaggcccagagccgcatcagcgacctttcaacgcgcccgctgttcaacgatctggcgcaggcgcgcaagaccaacgaggaaaggctgcccttatacgaagaagtagccgatgtcgtgatcgacacggcaggcaagagcgtgggcagaatcgccgccgaagtaagagacgtgttgaagaaagagggaatcttgtggcagtcgcacgaatagtggtcaacatcgccaatgccccgagctacgacgttcgcataggcggcaaccttgtcgaaaagctcggcggctacctgagggaggtcaaccagtcggataccgcccttgtcatcaccgatgaaaatgtcggaccgctctacctcgccgccgcgaaggcgtcgcttgtcgatgcgggataccgtacgcttgacatcaccgttccggcaggcgaggggtcgaagtccgttgcggtttcgagcgagatctggacggctatggccgacctcaagctcgggcgcgacgtgctcgtcgtggcgctcggcggcggcgtggtaggcgatcttgccggattcgttgcggcgacctacatgcgcggagtcgcgttcgcccaggtgccgacaacgctgctcgcgatggtggattcttcggtgggcgggaaaacggggatcaacctcgaacagggaaagaacctggtcggatcgttcaaacagccgattcaggtgtgtgcaagcgcctcggtgctcgccacgcttcccgaacgcgaatgggcgtgcgggtgcgctgagatcgccaaatcggcggttatcgactccgacgagttcttcttctggcttaccgatgcggcggaggcgcttgctgcacgcgacgagggcgtggttgccgaagcaatcgcccgctcggtcgtgttcaaggcgaacgtggttgccgaagacgaaacggaaagcaggggcgtgcgcgaatgcctcaactacgggcatacgctcggtcacgccatcgaggcgcttgccgggttcggcgcgttctcgcatggcgcggccgtggccgagggcatgcggttcgccgcgcggctcggcgcggcttgcgtcggcactccgaccgatctgatcttcgcgcaagacgaactgcttgacgcgcttgggctgccttcgctcgactggtcggcaaagcccgaagaactgcttgcagctatgaagggcgacaagaaggtgcgcggcggacacctgcgcttcgtgcttccgcgagaagtggggctgtgggaagtggtcgaggtcgatgacgaaacggtgctcgagcatcttggcgcctgggtccgctcgaaggagacgcagatcgtgcagtaacgcatcgatcttgccctgcttccggtcgggccaagcgctgcctctggatgccatctccgaagcgctaccccgaagggcggctcccgaagagcggctctcgaagggcggctctcaaaaggccgtctccgaagcgccatcccaaagggctgcttccgaaatgcacgcttttgcccgaaatgttgcgttttttcggtttcgggggctggtcggcggccctcaagatggaaatcgcggaaacggcgaattgctgaaagcgattgacctggttttatgccgagcatgagtgcgggcggttttgtcagagcgcttcggagtgcaacatttcgagcaaaagcgtgcatcttacgcgccgccctgcatccgtagcggcgcgtaagattcttcgtgatatactcgcccgtgccgatgcgtggcgggctgcggcaggttgttgttgcgatcgaggtgcaaaggagtttctggtgaacaaaatccttctgttgaacgggccgaacctcaatatgctcggagttcgcgaacccgaggtgtacggccgcgatacgctcgagtcgatcgaagccgaggtaggcgcgtatggagccgaaaggggcgttgccgtcgattgctttcagtcgaaccacgaaggagcactcatcgataagctccacgaggcgcatacggcttacgacggcgttatctacaatcccggtgcccatacgcattactcgtatgcgttgcgtgacgcgatcgggtcaatcggcacgccggttgtcgaggtgcatctttccgatattgaagcgcgtgaggagttcaggcgcatttcggtgattgcgccggtgtgcgtcgcgcagatcaagggcaagggaaagctcggatacaaggaggcgctcgatgtcttgctcgaactcgagaatcggtaggcttcgcgaccgcatggccgacttgaaggccgatgcgatctacgtccgcgaccagtcgaatctaagatggctgaccgctttcgacggcgtgttcgatgacgaagacgcccatgcgatggttgtaacgccaggttgtgccgtgcttcacaccgattcgcgctacgacgaggcattcggccgcgcggcgaagggtaccgaggtgcggatcgacggctcgaggaagacccatgcggcgtttgcgaaagcggccatcggcgatgcggctgcgacgctggccatcgaaacgtcgatcgaattgggcgaataccgaagccttgaaaaagagttcgccgatgcgcccatccgcatgctcgaaacgagcggcgtgatcgtcggcctgcgcgaggtgaaagacgccgacgaggtcgcccgcatgaaagcagcccaggctatcaccgatgccgcattcgcgcatatcgcggcattcgcgaagccgggcatgaccgagcgcgaagtgcagatcgagctcgaggatttcatgctgcgccatggggccgagggcctggcgttttcctcgatcgtggcgacgggcgccaacggcgcatcgccccatgccatccccggcgagacgatgctcgaggcggggcagtgcgtcgtgctcgatttcggagcgcgagcgcggggatactgttccgatatgacgcgcatgctttttctgggcgaacccgacgagcgcatgaggcgcgcttacgagatcatccgcgaagcgaacgaacgcgtggaagatgctttgaggcccggcgtgatcggtgccgacatgcatcaacttgccgaagacgtgcttgtccaaggcggctttggcaacaagatgggtcacggcctcgggcacggcgtgggcatcgacatccacgaagagccggttttatcgcctcgaaacaagaagccgcttgcgccgggcaacgtggtcaccgtcgagccgggcatctacgtggcgggtgagttcggcatgcgtttggaggatttcggcgttgtcacgcatgacggattcgaggtttttacgcaatccactcatgagatggttataatatagcggctttaagttacgtgtgggatgcagggcatatgatcctcgtgtcctgaatctgaaaggatttgatagatggcaatttcaaccgccgatttcaaaaacggcatctgcatcgagtacaacggaagactttgcacgatcgtcgagtttcagcatgtgaaacccggaaagggcggcgcattcgtgcgcacgaagcttcgcgacatcaaaaccggacgcgtgatcgacaacacgttcaacgccggcgttaaggtcgagcaggttcgccttgacaacaagaagatgcagtacctctacaacgacggctccgattactatttcatggacaacgacaccttcgagcagatgtccgttccctccgagatcatcggcgacaattcgcagtggctcaaggaaaacgacgaagcttcaatcctctatgcgggcgacgagctcatcagcatcgaaccccagatgttcgtcgagctcgaggttaccgaaaccgagcccggcttcaagggcgacaccgccacgaacaccaccaagcccgcaacgctcgagaccggtgcgaccatccaggtccccacgttcgtcgagatcggcgacgtgctgcagatcgacacgcgcgacgggcgcttcatcaagcgcgtgtaagcgcagggcaaggcaagcaaatcatagaaaaaggaacgggtcgtcggcccgttcctttttctaaggtgcatggctgtacgacatgcacctcgcatgctcggcagacggttgttagccgactcgagcgaggagaatcgaatccgacggtcgaaacgctcgaggcgattgcgcacgggcttggaagaagactcatcatcgcgctgcagtagggaagaggcgacgggcgcagcttttgcattgtgcagtcccgcctgcgccttccacccctcgaatatgttacttgtccacgaaatccgagcctccctgatggattcagtccgcattcttatataatgctctaatgcctgaatggcgcgttgccgtatggttcgggaaaaccaccgcataacgaggctttgtgggtgccgttcaggtccgttctttgactattaccaagaagggggtgtgagttcatgccaagacttcagattatggataccaccatccgcgacggccagcagagcctgtgggctacccgcatgcagatcggcgatatgcttccgattctgccgaagatggaccgtgttggatattgggccatcgaggcgtggggcggtgcgacgttcgatacctgcctgcgctttttggacgagaacccgtgggagcgtttgcgttctatcaaggccaagacgcctaatacgccgctttcgatgctttctcgcggccagaacttggtagggtacaaacattattcgcgcgagatatgcaaccgcttcatcaaggcggctcaccgcaacggcgtcgaggtgttccgcgtattcgatgccttgaacgacattcgcaacgtcgtcgataacgccgaagccatcaaggaaagcggcgctcatttcgaaggcgctatctcgtatacgatgtccccggttcacacgctcgacagttttctcgagtacggccaggccatgaaagatctcggagccgattccatcgccatcaaggatatggccggcatgctgactccgtatcgcaccgagcgcatggtcaaggcgttcaatgccgaaatcggcctgccggttcacatccattgccattacgtcggcggcatggctcccgcaaatatcatcaaagcggccgaagcgggtgcggcgatcgccgataccgctcatgcgccgctcgcgttcggcaacagccatccggcggtcgagatgatcgtggccgccctgcaagagagccgctacgatacggggctcgatctcgatctgctgttcgaaatcgccgagtactgggaagaggttcgcaagcgcggccattacaagcgcggagtctcttcgctcatccacatgcaggtgtactcccatcaggtgcccggcggcatgatgtcgaacctcgtttcgcagctcgagattcaaaacgccggcgaccgtttggccgaagtcatgaaagagattccgaaggtgcgcgccgaggtaggctatccgccgctcgtaacgccgctttcgcagatcgtcggcacccaggcggtgttcaacgtgcttacgggcaagcgctggagcgttgtgtccaaggagatgaaagactacatctgcggatactacggcaaagctcccggtcctatggacaaggagatcgtcaagaaggtcgtcggcgattccgagatcctgcctcccgaggtggctcccgggtctcttgttacgacgacgtacgacgaggttgccgaagagataggcgatctcgcaaaaaccgaggaagatgttctgatgtacgcgttgttccccaatgaggcgcgtacgtatttgagcaagcaccgtacatccgaaaaagtcgattttctgctggagcaggaatcgagcggtaccaaggaggacgattacgtggatatcaatcagattcgcgagctggttcgcgtggccgaggagagcggcgtcggcgagatcgtcgtcgaagaagagggcacgcgcattgccgttcgcatgcccggcgccgtccccgccgaagcggccgcgcctgcggcagcaccggttgctgcggtagccgccgccgatcaggctgccagccaggctcccgcatccgccgcagccgataacgtcgaccgacctgccacctggaagcccgttatcgcgcctatggtgggtacgttctacgtggcccccggccccaacgagcctccgttcgtccaggttggcgatgaggtagcggccaatcaaacgctgtgcatcgtcgaggccatgaagctcatgaacgagatcggggccgacgagatgggtacggtgcgcgaggtttgcctcgaggacgcaagcccggtcgagttcggaaccgtgatgttctacatcgagcctttgggaacccccgctcccgcaccggagactgcctaatgtttagcaagatattgatcgcaaaccgcggcgaagtggcgctgcggatcatgcgtgcgtgcaaagagcttggcgtgaaaaccgtggcggtttactccaccgaggatgccgatacctatccggtgcagtatgccgacgaggcagtctgcatcgggcctgcccccgcaaacaagagctacctcatacagtcgagcatcatcgctgcggcgataaactccggggccgaagcaatacaccccggatacggattcttggctgaaaacgctgatttcgcccgcgcctgcggcgacaacggcatcgtgttcatcggcccgagccccgaatgcatcgagcgtatgggcgataagagcgaagcccgcgaaaccatgaagatgtgcggcgtgcccacggtgcccggctccgatgggtgcatcgataccgtcgaggaggcgcaggagttcgcccgccgtgtcgggtatcctgttctcatcaaggccactgcgggcggcggcggcaagggcatgcgcgaagtgcatcatcccaacgatctcgaggcccagtacaaggcggctcgcaacgaggcgggtgcggcgttcggcaacgacggcgtgtacctcgagaagctcgttctgaggccccgccatgtcgagattcaggtgctggcagacgatttcggcaatcgcgtggccctgtgcgagcgcgattgctccatccagcggcgtcaccagaagctgctcgaagaggctccgagcccggctctgaccgatgagatccgccggtctatgggcgttgccgcactgaaagccgtacgggcggtggattataagaatgccggcacgatcgagtttctgctcgatcaagacgggcgcttctatttcatggaaatgaatacgcgcgtacaggtcgagcatccggtaaccgagcagatcacgggaaccgatatcatcaaagagcagcttcgcatagctgcgggcgagccgatgagctgcgccgatcgtgcgccgttcacgccgatgggccatgcgatagagtttcgcatcaacgccgaggaccccgatcacgatttccgtccgtgcccgggtaccgttacggtattcgacatgccggcgggccctggtgttcgtgtggagagttacgttcgtgcgggcacgaagatttccccgtattatgattcgttggtagcgaagctcattgtatacggacaggatcgcgaagaggcgatcgcccgtggcaagcgagcgcttgacgagtttgtaatcgaaggaatcaagacgaccattcccttccacaagaaggtgctggaaaacgaagcgtttgtaaagggcgacttctcgactgatttcttggaaacgcagatgggagatgctagcaatggctgatctgaacgttgacggcatggcgcttgcgcctggtgtcgtggaaaccataatctcgattgctgcgaaagaggtgcagggcgttgcctccgtcggtccttccggcgtgggcggcctgcgttccgttttcggatcgaagccttcgacgcagggcatcgaagtcgatgtcgacgacaacgacgcgctgcatgtttcggtgcgggtcgacgtgtactacggccacgtgctccccgaggtcgccgatgcgttgcgcaccgctatctcggatgccgttgcaagccagatcggtattcccgtcggcagcgtcgacgtgtacatcgacggcatccagttcgccgaataagcaattcattaaaaaggtagtgatgcatgtctgctaagcgacacgaaaggaccctcgcgcgccgcgcggcgctgcaggtcctttaccagggtgagatcctcgacgaatcggcggcggcaatcgtcgccgatgatcgttatttggccgacgacggtccgcttcccgcctatgcgtgcgatctgctccgcgcgatcgaagagcataaaagcgatatcgacagtcatctcaaggcgacttcggagaactgggcgcttgagcgcatgccggttgtcgaccgctcgattctgcgactggcaacctgtgagatgatgtatgtggacgatgtgccgctttcggtttcgatcaacgaagcggtcgagcttgcgaaagatttcgggggcgaagatgattcgccccggttcgtcaacggcgtgctcggtcgcattgcgacgtcgttggaagaggaatgcgatggcaagtgagacgaatatcacgttcgaaaacgtgaaggagcgccttgacgagatcgtcgatgctgtcaacgacgagagcatttcgcttgacgacgcgctcgatctgtacgaagaggccgtcaagctcggcatgcaggcaagcacgctgctcgaagagggcctcgcccaacaggatgccgaggcggaagccgacggcggttcgatcgacgaggcgaacgcggcgtccgtttccggtacggagcaaagcgccgtgtcggaagacgcaggcgcggcggatgcagacgagcgggcggaagatgccgtctcccgacttcagtaggtgagcgtatggacgaccgtattctcgacataatcagctctccgagcgatctcaagcttctcaccgatgaggagcttgcgcttttggcgaccgagatccgcgaggaaatcgtaaccgtgacgtcccagaccggcggccatgtcgcatcgagtctcggcgcggtggagatcatcctcgccgcccattcgctgctcgattgcccaaccgacaagcttgttttcgatgtgggccatcaggcttatgcgcacaagcttttgacgggtcgtcaggatgcgtttgacacgctgcgctgttacggcggcgtatcgggcttcccgaagcccggagaaagcgaatacgacgtgcatccctcggggcatgcctccgattccctttcaacggcgctcggccttgcgctggcccgcgatctgaggggaacccatgagcgcatcgtcgccgtgatcggcgatgcagcgctttcgggcggcatggcgttcgaagccctcaaccatatcggccaagcgcagacgcccatggtcatcattctcaacgataacgagatgtcgatttcgcgcaatgtcggcgccctcatgaagcacttgggctacatgcgcgcatcgagccagtacaggcagacgcgcgattcggttcaagaaaagctcgagagcagcggttggctcggcaacgccatggcgaacttcggacgcaacatgaaggaatcgatgaagcaattcgtgattccccgttcgatgattttcgagcagctgggcattctgtgcaccgccccgatcgacggacacgatataccgctgctcagggaaacgctcgccaacgtggttgacaccgatgtgccggttttggtgcatgtggttacgaagaagggcatcggctacggtccggcggagcgctcgcccgaggtattccacggcgtggcgccgttcgacatcgaaacgggcgcagttaagaagaaatcggccaaagcgccctcgtacacatcggtgttctcgaaggccctcgtcgccgaggcggcaaaggacgacgacatagttgccattacggcggcgatgaaggacgggaccggcttggccgaattcgcggagctgttccccgatcggttcatcgatgcgggcatcgccgaagagcacgccgtcgggctcgcgtcgggcttggcggttggcggcaagaagccggtcgtcgccatctactcgacgttcttgcagcgtgcgatcgatcagatgatcatcaacaacgcgcttcccgaactcaacgtggtgttcgccatcgatcgggcggggattgtcggcgaagacgggccgacgcatcacggcatgttcgatatcgcgtatacgcgcatgattccccacatgaaagtgctcgcgccctcgaacgaggcagagctcgtgcgctcgctgcggacggcgctcgctttcggaggtccgtttgcgatccgctacccacgcggtgaagccgaaggcgtcgagatacctgcggagtccgagccgttcgatctgggaaaaagcaggcttgtgcgcgaagggtccgatgccgctgttctcgcatttgggcgtatggtgggcaaagcggaggaagctgcgtgcatccttgcccgggaaggcatcgaagtgcgggtcgtcgacatgcgttgggtcaaaccgctcgatacggaggccatccgcgaggctgcgaagctgccgcttgtcgttacggtcgaaggcggcgtgatcgccgggggagcgggcgaaggggttctcggcgaactcgcgaggctgcgggcgagcgttcccgcgctgacgctcggcatcgacgacacgttcgtgagccagggcaaaaccgatctgctgctgcatgatcttggcctcgatggcgaaggcattgcgaagtcggtgaggaaagcgctcgggcggtaggagcctccgcgttcgctgccgatgaggtgcgccgcttcgtttggctatccgacgaggtggattgtttcgtcgaacgtttcggcgagcttccagggaccgaagagatcggctgatgcaaacgatgctttagccgttcccgaattgccttgtccgagggtcatcagataccaaccgtcttcgtaaacgaggctgtcgatggtggagaggtattgcaccttcggcggcagatcgccatagggcagctgcacgctatgccaggtatcgcccgtgtcggaagttgcatacagtacaggatacgatccgtccatcccgtcgttgagtgcgacgatgccgtttctctcatcggccatggcgatgtctgcgagcgtgctgctcgtcatggtgaggggaagctctttttccgtccagctcgttcctccgtcgaaggagaaatagcacagcttgtgctctccggcgcccatcgaccaatcggttccgagcgccgcgtaggcgaagtcgggcgagatgaacccgatagcgcgcttcgtgatggctcgtccgaattccgcggcagacgagagcggcacggttgtccacgacgctccgtcatcgaaggtcatcttcaaagtgggtgccccgccaaagaaaaacgcgatcggcaattcggcgtcggtcgacacgaatacgctttccggtgggagaagcaggccgtttcggtagaattcgagggtttccgcaagctcttcttcggtgaggtcggactcgatccagctttgcccgtagtcttttgtgaatcgcagggtttcgccgctgatcgcatagtcgcattgcatggtcgattgctggtttcccgttgccgtttcggcttctgcggggtcgaacgcgtacaggtactgctgtccttcaatcgtgctcatcccatcgaagaggcggattacgacgttcgtgttgccgtcgctgaccccacctcttcctgcattgtatgcttgctggtcgagtacgggaaaggccgcgttatttctgccgtcgaagatgggcgtgccttccgggattaccgtatgaggttggtagctgacgacgaagcggtcgagtccgctgaccttgatttggtcggctaaggggattttcccgagttgctcgtccaagtaatcgagcgtgctgttcgggttggcggtgtgcacgatgttcgagctgtcgggctgcatgcgctcgtatgaaaggacgatgcccgaataaacgtattgcgccatccctcggtagttcccgttttcaaacacgtcgagcgaaagagtgaagctttcgacgaagccgttttcgtcgaccgtagcttcaaaggcggcaacggtgcaatcttgcggcgtttctcccgattgctcgatcaggtcctgaaaacccgataatcccttttcggaaaggggataggagttaagcgaatagaagttatcgccgcgaacgatgacgcctgggtggatgaccgcaagaacgaacgcaacggctatcgcgatgcaggttagcgcgatagccgcgatgatgatcggtgcctttcgcctcgaattcgcggggcttttgctttcgcgagcgtgtcggggctttgtgggatgggcgtccgtcagtcggcctttctctccatgatgtagtcatccatgacgaatccgcctccgatatcggtttcggcggcttcgatcgtttcgaagcccttcgcctcgtatgcgcgaatcgcgatgtcgttttgcttgttgacggtcaggtacatggcgctgaggccgcgcatgttgcacaggcgattgtagaagcggatgacgcgggttgcgtagcccttgccccgttccgattcgtagaggtagatcttcgatatgaagaaccgtttggtttcgggttcgaccttgcctccggtgtagcctacaacgcgctcttcgtctgcttcctcgtcgacgagaaaccagtactcgtattcgccgtttctgatatcgcggatgagcgcttcgaagctttggaactggtccaccatgtagtcggtctggtctttccctatacgcggcggccaatactcgtgccagatctcatctgccatggcggcaagctgctttatctgctcttcggttcccacaggttcgaatctcatatgcatcctccttggcgcatgccccggtgtatcgtcgtgtttccgtattgtaacgcgggggcttcccgtttgttaaaagacttttccgaatccgttaacagtcccgttcgagccgctcgcggcaaaggcggcgtgcaattatcgagatgtaaaacaactgatcggcgaaaacagaggaggcaaggaaatgttcgatacaggttcgacgggcttcatgatcgtttgcgcgatgctcgttctcctgatgacgcctggcttggcgtttttctacgggggattgagtcgtcgcaagaacgtcgtgaatgccatgatcatggtgtttgcggtgatcgggatcgtcgctatcacgtggacgcttttcggatggtcgttcgcatacggcggcgacgggtcgattccctttttcggaggctttgaccagatcgggtgcttcggagcggttcagggcgtgctcgccgaggcgcaggcggttcccgaaggggcggtttatccgagtgtcgtcgacatcgtatttcagatggcgttctgcatgataactacggcgatcatcaccggcgcggtggcgggtcgcatcaagttcggcgcgatctgcgcgtttctggcggtttggaccatcgtggtgtatccgccgcttgcccatatggtgtggggcggcgagggcagcctgatcggcgatgccatcggtgcgcttgactttgcgggcggcgatgtcgttcatatctcatcgggccttacggggctgatcctgtgcctcattgcgggcaagcgcaagggcttcggcatgatgagctaccgcccccacaacgttccgttcgtggctttgggtgcgacgcttctgtggttcgggtggttcggcttcaacgcaggatccgagttcgcggctgatggcatcgccgctcttgcgctggtcaacactgtggttgcatcgggctcggcgctcgtgtcgtggatggtggtcgagcggttgaaggtcggcaagccaacgcttgtcggcgcggcgaccggcttggtagcgggacttgtggtgattacgcctgcggcagggttcgtcgagccgtgggcggcgatcgtcatggggctcatagtttcccctgtttgctactttgccatctcgttctgcaaaaagaaactcggctacgacgatgcgcttgatgcgtttggctgccactgcgtcggtggcatcgtgggcggtgtgctcacgggcctgttctgcgttcccgagctctcatggaccgaattcggcggcctgctgtataccggcgatccttcgctgctcgcgagccaggtcctcggcattctcatcactgtggtgtttgtgggggtggccgacgtcgttctcgggctcattgtcaaggcggcattcggaggaagcctgcgggtgagtgaagataaggaagcggccggccttgacgttgcggagcacggcgagagcgcgtatccggcatacatcggcctcgattagagtagggaggattacgtatgaaaaagatttcggcgattgttcgccctgaaaagctcgaacccctcaaagacgccctctttgcggcgaaggtttcggggatgaccatatcgcaggtgcatggctgcggaaaccagcatggatggaaagaatactatcgcggtaccgaggttatgctcaacatggttccgaaggtgaagttcgagatcatcgtcgacgacgacctcgtcgacgctgttgtcgatcttatctgccgaaccgcgaagaccggcgaagtgggagatggcaagatattcattttccccgtcgatgaggtcgtgcgcatcagaacgggcgagcggggggatgctgcgatttagcaacgaaatcatctttactgcgatggtgccgatgggagacgggctttgccggcaacgatgccggcaaagcccgtcgcgttgcatctgcggtatgtgttttgtcgatcggatgcaactcgatggggtcgtgctacactgatggaaagcagttgcgtgggaggatgccatgaaggcttcgggaatatccgaggtgcgtacatacgcggcctttctcggtttcggattttattgggcatgggttacggtcgttttctacagcgatgccctcgctcctggtgtttctggcgccgacggcatggtcgaaacggtttggctctgggctacctgggctcacgccattgcgcttctgtcccatgccgcccttgctcacaggtttccttccgcccttgacggcagagttttgaaactcggggggtcgatcggcactgctgtgggtacggcgttgattccgcttgtccttttctcgtttggcaccgagtcgctcatcagtacggtttcaattcccgtgttcgcggtcttgatcggggtgacaagcgcgtggctggtgctgcaatgggctgaacggtatgccgcgcttgcgcgtggaagggttacaacgctttccctgctttcctttttatgcgggctgtttgtgtattttctcttcattgcgcttcctgctcccattacgacggttaccgctgttatgctgccgcttttttcgggggcgtcgatggcgttttgtgagattgatggcgcgcgcgtcctgggcgccgatggcgaaaagtcggagcgcggtgcgaccggcgagactcatctcttgccgcgattctccatcgggttgctgctgtcggcgtttgcggtgttcgtgttcgcgctttgcggtgagatgctgagggcgttttctttgcagctgaccaatgctggcgtcaacgaaatgggctctctgtatctgctcggtggtacgcttggcctacttgccttgacgacctaccttatcgctcccgtcggacggcgcgatcgcaagcggatcacgctgtcgcttgtgaggaacatcctgataatcatggcggcggcgtttcttctggctccttttctcagcggcatctcgctttccgtctcttacgggatcttcggagcgggcttttggtgtttcagggcaatatcgtggattatgtgtctgctgattgtcgctcgttttggatatcggcccgttcgcgccgtcggcgttatggatggtgcattcgctttgtcggtcgttgtgagtacccagctgaactcgtggctggtcgagaccataaaggttgggggaaccgagcttacgacggttgcgctcatcaccgtattcgttttgatgtttattgtagtcgtggttctgaacggcaaggagacgggcggagtgttgcgggagacggtcggagatgatgattcgcaccattcgggatctgccgtcccgagggatgaggagatctcgttttgcatcgatggcattgctgaagaatacggtctatcgccgcgcgaggccgaggtcgccttgttgcttgcaaaaggacggagtcttccctttatccaaaacgaactctacatttcttcgggaaccgcccaaacccatgcgcggcatatatataaaaagttggatatacattcaagacaggagtttctcgatatagtcgaacggagaatttcctttcgagaataaagcatctgaaaaggcattatcagaaaatcagtgatttcatgtgatgcacgatcacatcttttcttctccgtttacgcgcctccgatgtttgacaatgcgactgcggacgggatcggcaatacgacgattccgcagaagcaaccagtgttcgcagagtgtttggagggaattatggagaaagaaaccagcaccatatcgcgtcgatcgtttttggcgggtacggctttggcgggtgctacgatggcgcttgcgggtgtggcgggatgcagctcggctcctgcttcaggcggttcggaccaaggggcatcttcttcggaggcaggcggagcggcgcagggtgcggacctggatgatctggctatcgctgcagtgccggtcgcggatgcgggcgagcctttgaaggagtgcgactaccttgtgatagggggcggcaactgtgggatgatgtcggctgctcatgcaagctcccttggccttaataccgtgctgcttgaaaaggcgacggtaaccggcgggtcatcggttggtacggaagtgacgatggctttttctgattgcaagatcatgcaggagtgcgcaggcgatccgaacgtcgtgaacatgagccagcaaacgggcagcgccagtgacatatacacgtacttcatgatgcacaattcatgggaggcgaatgccgagcttgtgacgaattacgtgaagaacaatcaccgacagcatgattttttgtacgagcacggagcgtatcccatgatgctgctgccttcgctcgatgctccgacggggggcattatgtacgaaggccagggtattggcgcattcgaggtgatgcagaaagctgccgagcagtatggtacggagatcctaacgggtgctcccgcaacagcgcttgtcgtcgatgattcgggcgccgttgtcggcgccatggccactatcgatggggtcgattcgtacgtaaaggcgaaagcggtattcatcggaacgggtggcttttcgaccaacgaggaaatgatcgagcgctttatcccggggtacggtcccatagcatggaaaaacgactcccatcttgcccatgatggagatggtattcgcatgatgctcggcgcaggtgcggtgccgtccgacatgggtctcgcccagccttctgcgtcgagcgtcgagggcgtcacctgggatacccccatcgacaaagcggcgcgcgagccatatctatgggttagcgctacgggagctcggctgggcaacgagaaatggtcggtcatggataccatgttcaaggtgggaataaaggaaaacgattatgtgtacttcaacgtgattgactcggcggccgtgaaaaggatggaaaccgaacctcttatgacaaacgcacgtaccgtgcttggctccatggatcccgtccccgagatgggtgacgagcttgagaggggagttgcttcaggcgatgtgtttaaaggcgaaaccatagaagagctcgcaaaagcggcgggcatagatgccgaagggcttgcagcgacggttgctgcgtacaacgagatggcgaaaacggggaaggacaccgaattctacaaggatggcgccgctcttttcccgatcgaagagggtcccttctacgcgttcaagctgattccttcgtggtattcgacgttgtgcggcgtgaagatcaacggcaaaatcgaggtggtgaatcagcagggcaggaagattcccgggctgtacgcaggcgggttggactcgggagagttcttcaaggataactacaatcacggcttttccggcggttgctcgggttactcttacttcaccgggttctatgccgcggaccaggctaaggagtatgttgaatcgctgtagggtttcgacgcttcgcgcagggggtcggccgaattgcggccgacccccattttggagcggttctgttgattgctcttttctgcaccatggggcatcattatctcaggatgctgcccgcgcatcgtcgcgagcggttatgcatgcagcgctcaaaggaggcacgtatggcgaacctcggtgatggattcaaagacattttcttggccggagtcggcgcgatggcgatcacaggcgaaaaggcccaggaccttatcggtcagcttatcgaaaaaggcgagatcaccgtcgatcagggaaagcagatcaacagcgagctcaagcacaaagccgaagacgttgcggcaacgcttcgctacgatgcgcttgaagcgcgcatggcggtcatgacgcccgaagagcgtaccgcgtttgccgcacgggctgccgagctggctgcgaaggcgaacgccgaatcggcggcgcaggatgctgctgcggaagatgcttccgaggcgtctgcggccgatacgtcctctgaaaccgcaaaggccgcggggaatgcctccgaggcggatggcgacgcttccgctccgacggcatagcctcggcgcaaccgaacagaagccatggcaggcaatacccttctccggtactttttcagctccgatgcgggtatcgatcccgagaatcgcttccacctgaatcgcaagacgagggcaagaaggcttcgggaaatttcgagcatccttcggaagcataaatttttgcgtggtttttcgcctgaagaattccgcgccatgctcgaagatcttggtccgagtttcgtgaagataggccaaacgctttcaacgcgttctgagatactgccgaaagccttttgcgacgagctcgaaaagctgcagatggcatgcgagccgttgccgttcgacgagatgctcgcggcgcttgacgcgcagttcggaagccggcgtgaagagatattcgtcacgatcgatccaacgccgcttggcagcgcatcgcttgcgcaggtccatcgggccgttctcgaaacgggcgatatcgtggccgtgaagatccagcgtcccggcgtcaaggaaacgatggcgctcgatatagacatcatgcgcatgttcgcccgtcaggcttcgcgctttatgaaggacgagcagatgctcgatttgcgcgacgtggtcgaagagctgtgggcgacgtttctcgaggaaaccgactttcggcgggaagcggaaaatctttcggagtttgcaagcctcaacaaagacgtggcgttcatcgactgcccgaaggtgtatcccgaactatgcagcgaatacgttctcgtaatggagtacatcgacggcattcccatctacagcgccgataagctgatcgagcaggactacgatctcaaggagatcggcagcaagatgctcgacaactacgcaacgcagatactcgaccatgggttctttcacgccgatccgcatcctggcaacgtgttgatacgcgcaggcaagatcgtttacatcgatcttggcaatatgggcaagctttccgcgcgcgatcgtgcagggttcggcgatatcatcgaggctgtgggcaagttggacgcatccgagttgaaggatgccctcatgcgattcgccatctccaaggacaacgcggtcatcgaccatacgcgctttctcgccgatctcgacctgctccttgccgattacggctcgtgcgacgtcgcggagatcgacataggtgcattcctcaacgatatccttgctctgacgcggcagtgcaaagtaacgctgccctcgtcgatcacgagcgtatcgcggggaatcgttacgatcgagggcacggtggggccgttcattcccaatctcaacatcgtcgccatcataaacgaccatatccgccacagcaaaagcgaacgcgacgagctgatagcggcgtttcaggaccttgcgcggtctttgcggtcgtctgcgagcggctcgctcgatgcagccgcgtattccggcgacgctctgaagatgctcacgcgcggacagctgaagatgaacatggaggtgctggggtcggaagcgccgctcacgcgcatttcgaagatagtcaaccgcctgacgatcgctctcatcatcgccggattgttcatcggatcgagtatgctttcgctttcgaccatggagcctcgcttgctcggggttcccgtgctggctttcttcggctatctgggtgccgccatcctttccctgtgggtcgttttcgacattgcgcggagaaagtgaaccgcagcaatcgggggcgaagccttgcatagctctctgatctgcggatcagccagatcgggccgtcctgtatgcagccgctcgcgctgcgcttctgcgcgcacttgcgttgcgttgctccacgtgttatcttaacgatatagaatcctaataggatgtatatctaatttgattccgtgcggtcgaaaacaacggcgaatgtttgcgtcgaggaccggccggcgggttttgagagaaagaagctgttatggctacggttaccaatcaggttgaggagcgcaagccggttacgcgcaacaccattcaacgggctctcgtcctcgaagcggttcaatcccttcacgagcacccgacgtcggctgatgtgtacgaggcggtgcgtgcgaagcatccgaacatttcgcgggcgacggtctatcgcaacctcggagtgcttgccgataagggcgaagtgctgcgcgttgaggtggccggcggagccgatcgctacgatttcttcaacgagccccattaccatgcacggtgcaggcaatgcggaatgatattcgatgtggatatgccgtatcggtctgatttgaccgaggacgtcatcgattcccacggtttcaaaatcgaaggccatcagatcatgttcgatggcgtttgccctgattgtcaaaagaaataggaaaacggaagagcttcgcatgaatcttcatacaatagttaaagatatgctatacactaatatataactgttagagggacttcttccagcgggaggctgctgggggggggggttctatgcgaggttgtatgcccaatccgtttgatattttcgatgcactatcggaactcgtctatgtaagcgatatagaaacacacgatcttctctatgtgaacgagtcgacctcgcgcatgatcgaaggctcttggcgggggcgcaagtgctacgatgccctgcagggattcgatgccccgtgcgatttctgcaacaacgacaagctgacggcggatggcttcttctcctggtctcgctataacgcccagttcggaaagcattatgcgttgaaggataagctcatcgattgggatgggcgtcctgcgcgtttcgaggttgcgttcgacgtaaccgatgacgtgcggcaaaaggccgttctggaaaaccagctgggcctcgagacgctgttggtcgattgcatcatggggtttcgccgctccgatgggttcgagggcgatctcatgcctgcgttcgagaggatgggccggttcttcaaggccgatcgcgtttacatcatcgaggtttacgagaacgggcgcatgaaaaacactaccgagtggtgtgcagagggcgtcgaatcggaaatcgacgagctgcaggatgtccctatcgaatgcatcgaacgatggcttccgcatttcgagcgtcgcgactgcgtgataatcgaagacatcgaaggcctgcgtagcgtttcgcccgccgaatacggcatcctcaagccgcagggcatctcctgtctcgtggtcgctcccattttcgacggcgacgatctgtgcggctatatcggcgtcgacaaccccgaaatcgaacgcctcgatctgagtgcttcgtttttcaagacggtgggaatgtttctttcgatggaggtcgagcagagcaagattcgggagaagctgcgccgcatgagcttcgaggattcgcttacgggcgtgtggaaccgaaaccgattcatcgaggatatacagcagatcgacgatgagggtccccgcgatcggttcggcgtcatgtacatcgatttgaacggattgaaagacgtcaatgacagggaaggccatgccgtgggagaccgctccttggtggaagcggccgatatcctcactcaaacgttcaaacgttccagcgtttaccggctgggcggcgacgagttcctcgttctatcgctcgataaggataaggatacgtttgagaggcgcgtcgaggaggcatcgcgaaagctgagcgcacgggcgtgcccctcggctatcggcacgcactatgccgtggaggcctgcacgatcgacgaggcggtcaagctggctgatgggcgcatgtatcaagacaagcgcatgttctacagcgaagcccccgaattgagccgccatcgcaacatgtacagaacggccgagtaggccgtctttcgcattcgctttacgtctcgggttgcggttcgatcgagccgcgatcgagcaactcgctcacggtgctttgcgggacgggtcgagaatacaggtatccttgggcgatgctgcgggggtccatcgcttcgatgacctgggcgtgttctagggtttcgatgccttcgaccacgatttccgtgccgagtctctcggcgatgtcgatgatgccttcgaggatcgttttgctacgcgagccgttgctggacgacgagagcaggaaagattgatcgatcttcaggatgtcgaccggcaggttctgcagggctccgagtgacgagtatccgcttccgaaatcgtcgatggcaatgcgaaacccgagatcgctcaggcgctggcacatggcttcggctcttgacaggtcttccatgacgatgctctcggtcagttcgagttcgagcatgtcgacgggcacccgatgggcgtcgacgatggtcttgagcgtgtttgggaaccgatcgtcgagcaggtggagacgggagaagttgcaggcgatggggacgatcgtgcgattttcgtcgatgcgcgctcggatgaaggcgcaagcctgatcgaacatctcgaaatcgatttcggtgatgaatccgttgcgttcgaacaggctgacgaaatctgccggactgcgcatgccccgtttgggcgcgatccatcgaacgagcgcttcaaggccgacgatctctcctgtttctatggcgactttcggctggtagtatgcgacgaactcgccgtttgcgagagcttcgaccgcctcgatttgcaaagctctctgcgctatgtcgttttccctcatgctgtccgtgtagcaggcggttatgctgtgggacgaatcccctatgctttcgcgcgcatagcgggcctggtcgataaggtccgaaatggagtcgtcggcacctttcgttcccgcttcgagcagcgcgacgccgccgaacaaaagcacgcggtaactcctctttttgaggatgtcgagatcgttcaggttgtcgtcgaactgggagaacctttgtttgaaatcctccattccgttccaccgaaggagggcgacgaactgatcggcgctgatccgggcatggcattctttgtcgcgacagaaagaatcgagcagcttgctcaaggcgagcagaaggcggtctccctcagcgtagccgaacgccgcattgaagctcttgaaacggctgatgtcgaagaacagcatcgcgtgatcgcgcgtcgcatcctcgttgatggctttggctgcttccacctggaaacgattgaggttccatccttcggtgagcgcgtcggtgtagacgaggtgcgtgatgcgcgcggcgttgcgcaccttgctgcggtagatataggcgaagacggcgataacgcagagcagcagggcaatcagtccgccgacgatctgcaaggggtattggcgcagaatatcggtgaccgtggcggggtgcgaggcgagcgccgtttcggtgatccaccgagttatcgtcgaatcggaggtgaactgcacgcaccgatcgaggatgcttgcgaggagggggtcggcggacgaggacacgccgatcgccatgttgttggtgtagtcggtcagggcgagcaggctgagggattcgtactgcggttcggaaaggaggtagtcggccacatggatgtcggcataggcgatatcggcctttccgtcgagtatcgcatcgaagcaatccttcggcgtgtcgtaatacgccacctcgttgcctttggcgtcttccgccatgaccgctgcaagcgagaacccttcgggcagggcgacgcgggagccggtggggttgctgccgaccacctgtgccatggggtctctcagatacgatcccgttgcccgaatcaagccgtcgggcgaaagctcgatcgaatggtcgacggcgtacacgatgtccgcttcgcccgcttcgaccatggagatcccgcctgcatgatcgtccgttgggatgaactcgaactgcaaccctgtgatgcgggtgatgtcttcgaacagcagcgcagcaacgccggcgaactcgcccgttgccggatcggtgtaggaaagcggggttctgaacgagtcgtatacgacgcgaagggtcggcgcgctttccatgtaatcgtattcctcgcgcgtgaaggcggggtcttggttcgtgttgatgctgaaatacgttttgtagagatcggtgaagaagtcggggttgcgaatggacaggctgtcgatggcgtcgtcgatgtcttccttgagctcgggtttgtttttcgcgacggtgatgtagaggggctcgggggagaattgggctacggttttgaactccgtgttgcctcccaggtaggttatcgctatggcgtcgagggttccgtttcgcaggtcgtcgatcaggttggtggtttctccgtatggtatcgtttcgacggcgagaccgtgcttttcgcaatacgcagcgaacgcttcggcatcgaggcctccctcgataacgccggctttcatcccctggaacgcatcgaaatcgtcgtaggcgaagcgcgaatcgtcggttcgggtgctgatggttgtgtagatgctgcaaaccgatgccttcgagaacaggaaatcccgctcgcgttcttcggaatggtagaccgacggaaggatgtcgacttcgcctgaggctacggcggcgtacgcctcttcccatgttgcatattcgacgaacctgtacgcccaatccgtgtacgcggtgatctgatcgaggtagtcgacgttgaatcccgagtacgttccgtttgcatcgcgcttcatgtagtcgccgtcttcgtagtaggcgacggtgacggttctttcggcttgcgagccggcggcgttctgctcttcggccaaggccggggtggcgcacgctcccagcatgatgcaggcggcaaaaacgatggcctcgaggaggcgtcgggcggaccgtgcgataggtgccgttgtctggatgatggtgatctcgctttgttctcgctctaacgcgtgtcgctttttgccacgtgtgcagcaaaaggctgcgccgtctataataatataagtagattgatcatactacggcgtttgcagatttcgatgggcaaggagcttcgatgggcatctgccgagacgaagcggtttgggggcgagtaccgtatgggcggctcacgcgttgatgcaatgatgaggatccgatgaatttcccgatgccctgtccatttcgccgtattgcgcggcagcgggcggcgcaatacggcgcagtgtcgggggtttaggcggactgtgttctggacctctttaccaaatcggcttgtcggggtcggacaactccatgccttcgggcaacgattggaagctcacctccgataatccgtaggcgttcgaaacgtaatcaacggcattcaatgcggccatgcggcctcccgtttgattccatccggcggcgatcgcggggaagacggtatagttttgattcgggttgagcagattgccgagcgagtcgcacccgaatgcgtaaagaccgtttatgggagtcttgtcgtcggttttgcatactctgatttcggagtcgacggtgaggcctccgcaggttgcgaaaatgacgttattcagcttgatcgcataaaaggggccttcgacgagagggtcgagcagttcggcctctttgccgtactcttcatcggatccgtcattgcagaagccgttgtatgcatcgacggtgcttcgtaccgtgcttggatcgaggccgatttgcgaggccaggtcttcgattgtatcggacttccaggccatgccttcgtcgatgcacgcgtcgaggcattcgaatatctcgggaacgggcatctctcggggaacgccgccctgacattggtacacctcccatcgcgatactttgttcagcccctgctccgccacttcgtcgagcattttcttcgaccagatcgaatagaagtagtggccgcatttgaatgagggccatgaggatacgtgaacacccgtggagaaaagctgcatgagggtgttctcgttggcgaagcgcttgccgtctggcccgatggcaagctggttgccgctaaggcccaatccgaggggagcgtcgttgatggtccacgtctcgtatcgtccggtgaaattgttcagcgcttccttgttgacgttgatcgggtacttcgtgaggaaatggggaaggccgatatgcatgacgatgggggacatgccgatgttgcgggttccggcgccgatgtcgatggccgcttgcaccatgagccccgtgtcggttcccactccgaggaacgggtagggtccattgtagggttcgctgagcaggttcgtgagcatttcgccgttggccccaaagccacctgttcccatgactacggcaccggcgttgatgacgtattgttttcccgttgcggtgttccgcgctttgacgcccttgacggtgcttgtcgcctcatcgtaaatgaactcgtacccttccgtttcgagctcaactcgggctccttgggcgaccgcacctgcaacgaagctcttgaggtagccgtcgacgatgacgcggcgatcttcgaatgtgccgggatcatgcatgggggcggggttggtatgaaaggagaccggtccatcttggcatccttcggggtcggcgctgcttatacgccacccgtttcctatttgccagtcgagggtgtctcccgaattgtcgatgaacatgcggatgacttccggatcggcaaggggggtgccgtcctctcccgtaatccattccatccaaaggttgtagtagtcgtcaggatcaatgaatcgctcgccattgttcagatggtctacgggccattggggattgacggattggaccatgtgcgtcaggcacgagcggcctccgattttgccggcgcgatcgattgccatcaggcttacccgcttgttgccattcagctcctgcattttttccgttgccgccttgagcgcgaagcagccgccgatgcttaaaccgacaatcagcacatcgacatcgacttcctcggtggtgccctcttctggtttgtcgaccgatttatgaaatgcggaaacgtctttttcgtccgatccccccgcaacgagcgcctgtttcaaggcatcttcgacggcgttttttaccgtcatgcttgagctggtcgccccggtgatggagtcgacgtcaagagattggctggctagtattcggggaatcatgttatcgcgcacgctgtgaaggatgggcgttgtttctccgtgttcgaaccggttttcgggaatttcgatatcgaggatggcgttttcgcttaccgttacggtgacgggaagctcgaaaagccctttatgtccaagggccttcccgacgtaagcccccggcgccatagttatctctgagttcgaagaggcgtccgcttggtcttttgcagcgcagccgccgagcgctgcggcgcccactgcgcccagcgcggtgaccgcccccagcttaagggcgtcgcgccgattgataactcccttgggtttgttgtccatgacaatcctttcgattcgttgaactccgagtggtgatccgccatctcttcgatgatttcgatggcatggaccgagcatggccgaagcgcctgtttttctcttcggcaaaaagatgcgaatggcagatggcgtatcggcagaaaggtgtggtttttcgaatcggacagatttcgtctgtgtttgaggggaccttgtagtagcatgtgcccaagggatgggttttcaatgtgggggcggtagtggatttccttggaaagcagatgagcaagccctggcggcttctgggcttcggatactttcaaacatgggtttatctgattgccttgagtcctgcgctgatggttcccgagggcatgtacgaggcggatccctccgtggtcggcatgatgctttcgggctttctgtttgccagtgcgctggctgtcgtggttgcgaacgcgttgaggagcttgctggaaaacagcttcgtgcttatcggagcgtgtcttgtggggggagccggaacgctcttgatgatctgggcgcccggcggtgatgcggcgcgtgttctcggcatagttctagccgacgcgggatcggcggtcttgagcctttggtggggaaagttttggtcggtcgcagataccgaacggatgagctggcaccttgtcgtttcgagcttgttctcctgcgtcctgtacctcctgctcgtatcgctgcctccctttgtcttggcatttatcgtgccggtccttccgttgttttcagccggggtgcttctgctcagcaaagacgaaccgcgcagaatcgttgttccgtccgacatcacgattctcccatcgcgatggaagcttgtagccgcctttctcgtgattcccattgcatatagcttgatcagggcgttttttgcccagggaaaccttgcggttttcggtgcctcccatagcatggttatggtgtcgttcgcggttttcgctctcatcatggccgccatcgttgctgcgagtggcaagcgccgagccatcgcccggctctaccgtacggtcatgacgctcatgctgctcggattcatatcccttatggttctgccgcttgatctgagatgggtggcgcttggtgcggttatgctgtgctaccctattttcgaagagctgatttggctcatgaaccccaatgttagggtatcggtaggggatcgcgttctcgatatcttcgggtgggggaagatcgtttttcgtgcagccgcctttttcggcgtgttgctcggtagctggcttctccaccagacgtggatcccgggggaggcgacaacggttgcgtgcatgcttatgaccggcctcgttgtaatactgtctgccaatgtgctgaccgaaaaggactttacgctgttcctcgatcccatcaaagtcgagaataccgagaggagatcccttctatcggagaggtctgtcgagcagagctgtcttatcttagccgatgagtacgggctctcgaaacgcgagtcggaagtgtttcaattgctggctcgcggaagatcgctttcgtttatagaggggcaattgttcatatccaattccacggctcgaacccacacgagaagcatttaccgcaagctcgatgttcacaccaagcaagctcttatcgacctcgttgaggaaaagtgtcgtgaaatagaagcttccgcataatcgagcgaaatcgctatcgggtgcgttgaaggccagtcggatgcgagtgcttccgcgcgatttgtgaaataccgcatcggaggagcgaatctgagcatcgggcgaaaacccctgtgctatactaattcagcttatatcgaagagcggtgtaagcgtgaaaactgtaggcccccgagacatgtttgtagcacggtgataagccaggcttcattgcataagcgaacatggtgaatgtagcaagcaatcatgacgaagggtccccgatttttgttttgaaaggggtccgttttgaccgaaatcaagaacacgtccgttatcgagttcgatgacatctccgatgagcagatgaaccagatgatcgacggaactctgaccgagttcgacgagggcgatctggtcggtggcacggtcgttaagatcgagcatgacgaagtgctcgtggacatcggcttcaagagcgagggcgtcattccctctcgcgagctgtccatccgcaaggatgccgatcctgccgatatcgttaacttgggcgatgagatcgaagctcttgttctccagaaggaagacaaggacggccgtctcatcctctcgaagaagcgtgccgagtacgagcgtgcttggattcaggtcgaagataagttcaaggctggcgaagttgttaccggcgaggttatcgaagtcgtcaagggcggcctcatcctcgatatcggcctgcgtggcttcctgcctgcgtctttggtcgaccttcgccgtgtgaaggatctcgacatgtacctcggcaccgaaatcgaagctcgcgtcatcgagatggaccgcaaccgcaacaacgttgttctgtctcgccgcgtgctcctcgaagagggccgcaagaacgagcgcgccgagattctcgagaagctcagcaagggcatgcgcctcaagggtaccgtttcctcgatcgtcgacttcggcgcattcgtcgatcttggcggcatcgacggcctggttcacatctccgagctctcttggaaccatgtcaaccatccttccgaagtcgtcaaggttggcgatgaggtggaggttgaggttctcgatgtcgatctgcagcgcgagcgcatctcgctcggcctcaagcagaccactgaggatccgtggatcaaactcgtcgaggcttatccgctgggcaccatcgtcgatggcaaggttaccaagatcgttccgttcggcgcattcgtcgagctgggtgaaaacgtcgagggtctcgtgcacatttccgagatgtcgctgaagcacatcgactcgccggctcaggtcgtgcatgccggtgacgaagtgaaggtcaaggtcatggagatcaaccccgagcgtcgccgcatctccctgtccatgaaggccgccgccgaagagctcggtttcgagatcgaggtcgacgaaagcgttgtcgtcgaggagaagcctgccaagaagaaggccgagaagaccgaagaggctccgaaggccgacgccgaggccgaggctcccgcagccgaatagcgtgcgatagcataaacgcagcaagggacgtccgagagggcgtccctttttcatatgagcaggacattgtcgagaggcataatcgggcctggctccgcgaacacgaggctaggcttctctatctcaaccctcctgcgacggcctcagcgtgtctttccgacgttgttcgaaaggcacgtttcatcgtggtgcatttcatgggttggcgcgctgtgacgtttgacggcgttgcggtgttgcggtgttgcgcggcaacgctgggtgtttcgggggcgccctctgtcgggcggaatcaaaaatgggaacatagcaccatgcacactttttctcgatgtgttgcgttcgcccgctgactattgcagcgcttttgctacaccgttccacgctccactgctacagcgctccatggcagactgccacaccctaacaatctaaattgccacgcgccccgaaaggggcgcttccttttccgccacaattccgatgggcacaaaagtgcccatcggaccattgcgagaaaggaagaaaaaatggtcaagtacagagaaatacttcggcaaagggcgatgggggtgagtgtcaggaacacagcgttctcgtgcaggtgctccaccgcaacggtaagggcggtgaccacccgcgcgaaggcgcacggcctcgagtggcccttgccggaggagatgaacgatgcggcgattcgagccgtcatctatccggcaaaggagcgatccgatatgtcgaaggcggagatcgaccatccccgcatcgacaaggagatgaaccgtcccggcatgaccatgctgacgctttggagggagtactgcgaggacgccctggcatcgggcatggaaccctacctgtactccgccttctgccagaagcaccgcgcctgggcggccgccaacaaggtctccatgcgcatcgagcgcaaacccgcccaggagatgcaggtcgactacgtcggcgacaccatggaggtgctcgacgccgacaccggcgaggcgcgcaaagtctacgtcttcgtggcgtgcttgccctattcgggcgagatgttcgccgagggcgcctacaacatgagagcggagtcctgggtcgaggcccacgtccacgccttcgccttcttcggcggcagcgtgccgatagtggttcccgacaacctcaagcagggcgtcgtcaagaacaccgtcgaagagctcgtgatcaacgagcagtaccgcaggatggccgagtactacgggtgcgccgtcgtgcccgcgcgccccaggaggccgagggacaagggggcggtggagatgagcgtgagggtcatcgagcagcgcgccatcgcgccccttcgcaaccagctgttcacctctctccggcagctgaacgaggctcttttggagaaggtgcgcgagatcaacgcccgtccgttccagaagcgcgagggcagcagggatgaggtcttcgtccgccaagagaagccgctgctcatcccgctgccgggcaagccctacgagatggttacccgcaaggttgtcactgttaattttaactaccacgtctcgtttgacggatgctggtactcggttccgttcagctacgtcaagcgcgaggtggagctatgcgccaccagatccgctgtttgggtggcctgcgacggcgagcgaatcgccatgcacgagcgcatctacggccctaggggaagctaccgcaccaaccccgaccacatgcccgattcccatcgcgactttgtggagtgggacgcgaagcgcttccgtaaatgggcggccgggatcggcccgtcctgcggggaagccgtcgatgccatcttgaggtcgcgcaagatcgagcagcagtcctaccgctcgtgccgcgcggtgctggcgctcgcgaagaagcacggaagggagatgctcgagcaggcgtgcgccaaggcctgctctctaacgcccaggccgagctacaagacgatcaaatcgattatctcggagatgggggccgcagggcccgaggaccaaaacgccggagcgtatctgcgcggaggcgactactaccggaacttgagcgagggggacgatgaataatgacggcgagccagacgacgatggacaaactctatggcatgaggatgtcggtgatggcgcaagcgtatcgcgaccaggaggaatcgcaaggagtggcagagatgaccttcgacgagaggttcgccatgatagtcgatgccgaatgggacgcgcgccgcatcaacaggaggacgaggctgttgcgccaggccggcttctccgatcccgaggcgaacattgccgatgtccgctacgacgcggatcgcaagctcgaccgcacgaaactgatagagctgtccaactgcacatggataagaggccaccgcaacgtcgtgatcacgggcgcgtcgggcgccggcaagagctggattgcctgcgcgctcggggtggcggcctgcaacgccttcttcagcgtaaggtacgtccggttgcccgaaatgctcgacgagctgaacgtgagcaagaacgaggattggctcaaggcgaagaagcgctacacgaaatgcgacttgctgatactggacgattggcttttggaaaagctcgaggggaaggcggcgcgcgagcttttagagatagtcgaggcgcgcttgcgcagcgggtccttattgatttgctcgcagttctcgccagcaggctggcattcaaagctcggggaaggagcaatcgcagatgccgtcatcgaccgcatagtctatcggtcggacgtcatccatattgaaggcgacgagtcaatgcgcaagcgcatcggctaagagcataaccggccgtattggccaagaggggcgcttgcgcgcccctcgcaatcagagcaacccgcattgctacgtggcagtctgccatggaacgctgtagcagtggagcgtggaacggtgtagcaaaaacggcgcaataagcacattgattattgcgggccgattgccacggcgttccacgcttagctgccacaccgtaccgcgcagggctgcctcgtgctaacgggggcaccggggcatctggcgcccccgtcttcactggcctttctagccgatgcgcttgcgcatcgactcgtcgccctcgatgtggatcacatccgacctgtacacgatcctgtcaatcacggcatccgcaattgcgccctctcccaactttgcgtgccatccggctggcgagaactgggagcagatgatcaaggagccggtcctgagccttgactcgactatctcgagcagctctcgggcctggtcgcccccgatcttctccagcagccaatcgtctactatcagtacgtcgcacttcgtgtagcgcttcttcgatttgagccattcctcgtccttggatacggtgagctcgtcgagcatctcgggcatgcgcgtgtagcgcaccgagtagaaagcgttgcaggccgcgacgcccagagcgcaggcgagccacgacttgcccgcgcccgaggcgcccgtgatgaccacgttcctgtgcgccttgacccactcgcagttcgccagctcggcgatcttcaccttgtcgagcttgcggtcggcgtcgtagcggatgtcgatgacgttggcctccgggtcggagaaggccgcctggcgcagcaggcgggtccgcttgttgatgcgtcgcgagtcccattccgcgtccacgatcatcgcgaagcgctcgtcgaaggtcatgtcggcaacgctcagcatctcctcttggtcccgatatgcctgcgccatcaccgacaacctcattccgtacagcttgtccatggtagtctggcttgcgctcatcgtatgtctcctttgctatcgagggttgcgtaatagtcgctaccgcgcagatacgcgccggcatccgggtcctccccggacagctcggcgcttttggcgatgatcgacttgatggtcttgtagctcggcctgggagaataggagagcgccttggcacaggcccgctcgagctcttgccgtccgtgcttgtcggccagcgccatcaccgccctgcaggatctgtaggactgctgctcgaccgccctcgacgagaggatcgcctcaatggcgtcggcgcaagcggggccgatttcctttgcccatctgcggaagcgatccccgttccactcggagaagtcgcggtgggcgtcgggcatgtggtcggggttcgtggaataggaccccttcggcccgtgcagcctcttgtgcatggcgatgcgctctccgtcgcagacgacccacaccgcgctcttggtggcgcagacctccacctcgcggcgcacataggagaacgggacggagtaccatcctccgtcgaaggcgacatggtagttaaaattgacggtggcggccttgcgcgcgatcatctcgtagggtttgcccggcagcgggacgagcagtgctttctcttggcggaggaatatctcgtccctgctgccctcgcgcttctggaagggccgcgcgttgatccgggcgacgttgtccaggagcgccgcgttgagcgcatcgagggatgtgaagacgcggttgcggagaggggcgatcgcctgctgctctatgacccggacccccatctccacggctgccttgtcccgggggcgccgcggacggcccggcacgacggcgcatccgtagtactcggccatgcgcctgtactgctcgttgatcacgagctcgtcgacggtgtgcttcaccactccctgcttgaggttgtccgggacgaggatcggcgtggtgccgccgaagaaggagaacgccgacacatgggcgtccacccaggactcctccctcatgtcgtaggagcccttcgcgtagagcttgcccgagaagggcaggcatgccgcgaacacgtagaccttgagcacctcccccgtgtccatatcgacgacctccatggtgtcgccgacgtagtccacctgcatctgctcggcgggcttgtgggcgatgcgcatggcggtcttgcgagacatcgcccacttgcggtgcctctcgcagaacgccgagtacatgtagggggatctgccttggctgaccgcagactcgcagtactcggaccacagaagcatcatcgtcacgcccggacgggacatctcggcgtcaacatgatcgtggtcgatcggcgccttgtcgggatcggccttggatttgggaggatagatcacctccctgatggcgcgatcccccatctcctcaggcaggggccattcgatcccagccgccttcgctcggccggtgacggccctgacggtggcggtggaacatcggcacgagaaagcgatgttgcggatgctgacccccatggcgtgaagcctgaggatctctctgtacttgaccattttcttctcctgttctctcgatggccagcaggtgccttttgcaccacattgggattgtgcaggaaaagaaaggacgcctccgtctgaagacgcccttaaacgcggcaagccgggcagctagcgcgtggcagcgcaacgcggaacgccgcagcagcgcagtctggaacggcgtagcatctcagccgcaataatcacccgcttttttctggccttgaacggccactttgtgctccaacacctggggaaatgcttgtgatttgcgcgagtcgatccttttgacggtggattaggatgcgaaaacgcaacacttcgtggaaaaacgtgcgttttggctcgggctatcgctggaattggatggggaactccgaacgagcaacgtcgagcagctcttgttgcgagtggatatcgagcttcgcaaacgcattcttgatgtgggtgttcaccgtgttgagggagatgaacagcgcatcgcgaatgtaggggcggttccttcccgcaagaaggtaggcgatgatctcttcttcgcgaggcgacagcttgtagacttccgctatgcgacgagcctggtcttttagcgctgtatcgagcatatcttcaggggtgccgctctctgtgctgtcggcgatgggggttgctgctttgtcgtcggagccgaagcgtcgcgctctgccttcgagcgccatggtcgccgctaccagagcacagccgacaaagggaagtgcttgccatgcgctttcagggctgagcgccgacagcattccgagcccgacggagacgccgattgccatgccgaggcataggcccaccaggtagcatgagaagaagaacgtaccgctccccggtcttttatgcgccgctttggcgagaatgatccagaagaaggcttgcaggatcatcgaggcaatggagttcgctgcgcgcgcgtactggtgtccgacttcgccgtcgacgggaaggagggcgagcgctaagaggaggatcggaagcatccacctcgtcacaagtgaggttgtaagcgagcgagccgccgtgagtgcaagaacgacgaatatgccgaatacggcgatcggcaggacgaatacggaaaggaagtaccagataccctcagagctcgatcccgcctcgattgcgcgaatgatcccgtagcctatgcggaagacgagcagaaccattgtcgcggcgacaacgcctttgatgcggatgagaggcgttgctgcgagggggctgttcgtttctggttcgcgcaggggatcttgggcgttgcccgagcgagccgcggcgaagagcttcgtgccgcctccgagaaacaggatcgatacgagagggagaagtgccacgagcgcaaaggagatcgagggatcggttagcccgatgagagcgaacacgatgcgcgcgatgatgaacgacatgggaaccgagaactcgatcatggcgtcgttgcattcggatatgcggttgccccaggcaagcgtgagcgccgagaacccgaccgccgcgaaggcggcgccgactgctacgaggatgggcgaggggttgtcggcacgcgagcagcttgctaccgcgatggtgccgatggcgcacgctacggcggcgccggcgaaagcccacgggcgagttcgtatgggctgcggtgccttcaagccgagggcgaggcaccctgcaatgccgatcaaacccgatgtcgccatcgagatgatccaggggtattcgctcgcaatcccctgggattcacctacccatattagcgtcgaatagaacgtcgcgtagatccacgccatgaaaaacgaaagtccgaaaggcccttcgaagtattcccgcacaagggacactatgctgtcggattcaagcttagtcacgtacagtcctaatcgttatcccagttcaattcatggtgtcaccaggttgtggtgagggtttccttctgcgattgcccccgatttcaccgcatcgcagcgatgggctgaaccgtcttgcccgattataacagactcgcaatcgatgctgatccagtcgcatctaccgagaatcgaggtgggcttgcggttgctggaatgcggatgttcgccgaaccgtcgaacggggaggtgcacggatgcggcatcggcttttcgaacaagattcaaggaggcaacacatggttggaagagaaaaagaagcggcgatcgtgtctcgccgtagcttcttggctggagcggcggcgctgggagcggtttccgctttggggttcgcaggatgcgcacccgcatccgagaagggctcggatgcgggtgcaagcgtcgagggcgacgcggtcgtggcgaccgggtcgggtgcgggacgcatgggcgacatcatggtgaagatgagccttgtgggaagcactatcaccggcatcgaagtgatcaagcagcatgagactccgatgatcgcgaactccgctctgtcgaggattcccgagctcgtcatcaggaaccaatcgcttgacgtcgatgccgtagcgggtgccacgataacgagcttcgggctcaaggcggcgatcgaggatgctttggcgaacgcggggctcagcaaatccgaccttgcgaagaccggctccgacagcggcatcctggtcgaagagcccatcgaggcggatatcgccgtcgtcggcggcggcctgacggggctggttgcaaccgcgcgtgcgttgcagaacggcaagaaggtcgtcttgttcgaggagacggcgcacctcgggggatcgtcgtgcgtttcggacggttggataacgggagccgacaccatcatggagcgggccgagggtgtcgaggactcggcggagcagttctacgcgtttttgacccagggaagcgatgatcccgcgatcgtgccctatcccgagaacacgcgcaagtacgccgaaatggctggccccgtgctcgattggctcgacacgtacgcgaacgtcgacttcggcgaccgagctggcggctacggattgtacacgccgccggatcagccgcgaatctacggcgtgaacaacggcggcggggcgctcgatatggctctgattcagcttatccaagacgggataagagacgggaacgcctcggtcgtcctcgaggcgcgggcgacgagcatcctgaaagacgagtcgggcgcggtgtccggcctggagatcacctatgcggactcgacggtgagggagtacgccttcaaggcggtcgttctcgctacgggcggctatagccacaacgaggaaatgatgccgtacgagaactgcggcacgtgctcgccctcgacggcttccggccacggattcgagctcgctgaagccgctggggcgaacatgctgcctccggagatctacgctccctatgcgggcggcattcccaacgcgggtttcgagatgcggtaccaggcgaacctcaagctgccgggcgagatctgggtcaaccaggaaggtgcgcgcatggcgaacgaggactacccgcttctggcgaaagccgcatgggggaaggcatcaggcaacatcggcttcgtggtgttttcggaggctcagcttgtcgaaggccttcgccccatcgtgatgaccagctacctcgagggcgagctcaccccgtggcagagccgcgatctcctcgacgagctggttgccgaaggagacgtcgcgtggaaggccgactcggcttcggagcttgcgaaagccgcgggcatcgacggcgcgctcgccgaaaccctcgaggcgtatgccggctattgcgatgcgggcgaggaccccgacttcggacgcaccaagatgcagaagttcgaaggcgcgctgtacgccatcaaaaccatcccgtaccaactgcaatgcacgggtggcgcgcgcgtcgatccgagcgcggcggtgcttgacgagaaggacgagccgattgccggcttgttcgccggtggcgaggctatcggcatgcgccaaagctccgccgggggacagggcggctgcggcttgggcaacgctgctacatggggctacatcgcagccgattccgcaagcgagtacgtttcctaaggcttgcggcgccgatagggacgccgagaaggaaggagtccggaacgaatcgccgtccggactccttgttcgcttcagacctgtctcagtagccgagaacttctttgatcatgtcgacgtagacctgcgcggcttcttcggtaagatgggtgccgtccccatcgaaatactgctcctgtcccgcgcttatcgccgcccaatcgatgatgctcacgttttcatagcgactcgaagccgaccagagggcggtgttggtggcatcgatccacgactcgggggcgcgggcggtgatgaagtagatctgccgctcgtttccgactgcggctacaagatcgtcgatctgatcgtcggttgccacgccgttggttccgagggcgaatatgacggtctttccgacgacgccgagttcctcgtagtaggaaaacacgtcgattcccgtatagaactgacggctgacctgggcatcgatgaggccgtcgggaaacgcttcctcgaagtaggggatgatgcgaaccgagacggaatcgcctatcatcaccgggttgtattttttgaccacgggatcgggcttcggcagctcgatcacatcgcccacatggcggcttccgataaggggcatgagggagacgtcgagcccgttttgcttctgtatcagggaggcgcggctctgcacgggttccttcatctcgtcgatgccccccactgccgaggtgggcggaacgattgcgattcccccgattgcgacaacggcgacgatgccgcatccggcgatgggcacaacgtacttctgggcgaaggcatgtatgttgatttcgcccgacatgacgcctttgacgaacttcccgatggctccttttcgaatggggtcctcgatgaacttgtacgaaaacgccgatacggcgaagatggcaacgagttgcaggaggcaggaaagcggatcgatctccccggtggcgttgcgagggttcatgaggagcaggatgggatagtgccaaaggtacatgccgtacgagcgcttgccgatccagacgagcggccgcgccgaggcgagcaatccgaacctgctgcgcggattcgctatgacggcaatgactgctgcggtgagaaccgacgcgataacgaggccaccccagtacaaaaacggggagaacccgtcggtgaacgcaaccatgagcacgagtccgacgaatgcggctatgccgatgccatccatggccatgcgtccctgtttggtaaggcgaacgcctacttttcccattcggcttgcaggcattttgaacgcgagccaggcacctatgagcagagaaaacgcgcgcgtatccgtaccgtagtagacacggctcggatcgtcgatcgggttgtagagcagcgccatggcgagtgcggaagcggctgcgagcacgatggcgatgcggcgcaggagcgggcgtttggcaccgagcttgaacgcgatgagcagcgcgatcggccagacgaggtagaactgctcttctatggccagcgaccaaaaatggttgaggggcgagggcgcgccgagcgcctcgaagtaggaaaggtcgtggaatatgtaccaccagttgttgaaaaacagcagggcggggggaatgtcgggacgcattttggtaagaagctcgtggttgaagatcgtgcagagcgcagcgaccgcaacgatcacgaatacgatggcgggcacgagcctgcgaatgcggcggagccagaagttcttcagatcgatcgttttcgtttgagcccattcggttaccagcaatccggtgatcaggtaaccggacagaacgaagaaaaccgtgacgcccaaaaggccgccttttgcccaagagaaattcatgtgataggcgatgacggcgagtacggcgaatgcgcgcaggccgtccaaggcgggaatgtatcgcgatttggagcctgccatgcctcggttcttccttgcttcggggtttgtccgcttcccgaaaaaacgggagccgatgcattatatcaccagagcgcaaaggcgatgggcatccgagccgttttccctacgggagatcatgccgagacggcaggcgcattgccctctgggcgggcttgtcgattgccgagcacgggctcggcaatcctcgctactgattcgatgccgtttttccatcgaaggcgggcagcgtccgcgaaatcgcgcatgtgacgagccctctcttgcacgaaaatcgccggagtactacatgcggaaagtccgaaggcgctttcgccgcccgcctttgcatgcgaggtgcagcatatgcccagctcgctgaaaccagatgtcgatacggtggcgtgtgcggggccaggggaggctcgagcttgtaataatctgacgaaaaccgtgcagaataagggcttggagcttctcgggcgtccgtgcgcacaaatatcttccccaacccccttgacagttcgctctctgtccttatacttatgaacagttgttcatatgtttgaaaggtggagccgtggaacaggagaccgatcgcatgcctgcgtccgaagatgcgcccgcgtgcggctgcggtgccgcgcgcacagaggaagcgcccgaatgcatgcccgatgaggagctgctgtacgatttggcggacctcttcaaggtgtttggcgatacgacgcggatcaagattttgtatgccctgatgggcaatgagctgtgcgtggccgacattgcggaaacgatcggggcgacgcagagcgccgtatcccatcagctgcgcacgctcaagcaatcgcggctcgtgcgggccaagcgcgacgggaagaacgtcatctactcgctttcggacgatcatgtatacacgatgctcgctcagggcatgacgcatatttgcgaataaagggaacaatcgggtgggcctgcacgcgtgggtgcgaggcgaagcccggatctgcataccgtttcaacgaagggatttcacatgcgtaagacattcaagcttcaagacctcgattgcgcgaactgcgcggcgaagatggagaacggcattaagaagatcgacggcgtaaacgatgccgcgatgaacttcatgacgcagaaactcatgctcgatgccgacgattcccgcttcagcgagattctcgacgaggttgtaagcgtgtgcaagaaggtagaacctgacatggtgatccttcgctagcgagtaaaccgcattgccgcagggattgaaagacggggcctgcggctcatcgattaagacgctttcgccgagagcgaggtttgctcgcgcacccgaatctcttggcgaacggaggagagaatccatgaacaagaaacagaaacgaacgcttgcgcgcatagtcgttgcgctcgtgctgttcgctatcatctatccattgccgcttgaaggctggttcggaagcccgatggggctctacgtcgagttcgcgctgttcctggtgccgtatctcattgccggctacgatgtgttgctcaaggccgcccgcaacatagggcatggccagatattcgacgagaactttctgatgagcgtggcgacgatcggcgcatttgcgctcgtgttgtttcccgattctgacccgcatatggccgagggtgccgcggttatgctgttttaccaggtgggagagttgttccagagctatgcggtcggtaagtcgcgcaagtcgatcgccgatatgatggatatcgcgcccgattacgccaacgtcatgcgcgaaggcgagcttgtgcaggttgatccgtacgaggttgccgttggcgacgagatagtcgtgaagcctggcgagcgcgttccgctcgatggcgtggtgctcgacggcacgtcgcagcttgacaccgctgcgcttaccggcgaatcggtgccgcgccacgtggaggcgggagccgaggttatctcggggtgcgttaacatgacgggtgttttggccgtgcgcgtgagcaagcccttcggcgagtcgaccgtttcccgcatcctcgagcttgtggaaaacgcaagcgagaagaaggcccgcactgaaaatttcatcacccgcttcgcgcgctattacacgcctgcggtcgtgatcatcgccgtgcttttggcgattgtgccgccgctcttcttcggccaaagctggtctgattgggtgcagcgcgggcttatcttcctggtggtctcgtgcccgtgcgcacttgtcatctccgtgcccctctcgttcttcggcggcatcggcggcgcgtcaaggctcggcattctggtgaaggggagcaactacctcgaagcgctcggcgataccgaaacggtggtgttcgacaagaccggcacgctcaccgacggcacgttcagcgtggtggcggttcatcccgaggccgatgtcgatcccgatctcattctctcgatcgccgcgcatgccgaagcgtactccgatcatccgatcgctctgtcggtcaaggaggcctactcggggcagatcgatcgcgcgcgcatcgcggatgtggaagagaagggcggtcacggcgtgcgggctatgatcgacgaacgcgttgtgctcgtaggcaacgacaagctgatggccgaaggcggcgtggattatcacgattgcagcctgactggcacgattctccatgtatcgcttggcggtgaatacatcgggcacatcgtgatcgcggatgtcgtgaaggaagatgcggctcaggccatcgctgatttgcacgcggctggcgtcaagcgtaccgtcatgctgacgggcgaccgcaaagaggtggctgcagccgtagccgagcagctgggaatagacgagtaccgagcgcagctgctgccgcaggacaaggtgtcggaggtcgagaagctgttggccgaggcaaccggcaagggcaagctcgccttcgtgggcgacggcatcaacgacgcgccggtgctcacccgtgccgacatcggcatcgcgatgggagccatggggtcggatgcggcgatcgaggcggccgacatcgtgctgatggacgaccggccgaccaacattgcgaaggccatccatgttgcccgcaagaccatgcgcatcgtgcgccagaacatcgtgttcgcgcttgccgtgaagttccttgtgctgattctggcggctgtgggcgtagccaacatgtggcttgcggtgtttgccgacgtgggcgtggctgtgcttgcgatcttgaatgccatgcgcgccatgaacgtgaaaaaggattagcttgcgggcgcttgtaccgtaggctctggttttacgggtgttcgaagcgcggccgggcggaaaacgccgcttggccgcagggggccggcgagatccgtgcgatcgtcgggatcggcgttgcccgcatcgccttcgcccgcatcgctgctgccgttgcccgggccgcttccggctagactgccgcgatgccgcgatcgaacgcgaggagctgccgatagcgggagcttttctcttcgagttcggcgggagatcccgaaagggcgagcttcccgtcctctacgaatacgacgcggtccatcatggcgacgccctgaaggtgatgggtgaccatgatgagcgtcttgtccctcgttgtttcgaagaacgtttcgagcagcgctttctcggttgcgggatcgaggccgaccgtcggctcgtcgagcatgatgatgggaacgttttgcagcagcacgcgagcgagtgcgatccggtgccgctctccgcctgagaagcgcatgcccgcttcatcgacgagcgtgtcgagcccttcgggcagccgctcgaccatgggtttgagtcccactttgtcgagaacgtcccatatctcggcatccgaggcatcgcctctgccgatctgcaggttttcgcgcagggttctgttgaacaggtatgtttgctgttggatgacgccgatgtagcgcgccatggcatcgccgagcagatgggcgggcacgccgccgagggcgacgctgccgctcgatggcacgagatctcccctgataagcgaggtgagagtgctttttcccgatccgcttttcccaaggatcgcaaggcgttcgccatgctttacggaaagggttacgctgtcgagcacgtctttttcggtacctgggtagcgaaacgcgagattctcgattacgatgtccaggctttcggccggctcgggcgcggcggcgccggtttgcttttcaacgggaagcgcgttgagccggacaactgagtcgcggtatgcgctcgcctcggtggcggcggccggaaggggagcgaaggcgtcgataagcgggaagaagccgagcacgaacgccgcgatccagtttgcggcacctccgtgggcgccgccgaacaggcttccggcccaaacgagcagcatgacggcgaccgttgcgtacagcacgcttgcgacgagatcgcgcctgcgggcgaaccgctccatcgattcgtcaagcgcgcgcatggcctgttctgtggccttgtagcgcttgaggtactcgtcgccgcgatgcgagaagatccaatccgatacgccgagcacgttatcggtcaactcgctgtaaagctcgttcttcatggcttttcgcctcatcagacgcgccccgttggcgagtgccgagacgaggggaaccaggaacacgatcacgcccagcacgagcagtacggcaagggcgaaccacagcgtgaagaagccgagtccgatgactatgacgatgtagagcagataggcgacgatcgtcgggaacaccgtgcgaagatacaggttttggatatgtccgatatcctcggccaaaagcccgagtacatcgccggtgcggcgcgagcgcttgaagaacaccgcatcgccttcgagggaggcgtacagcttgagcctgaggctcgaggtcatgcgcaacacccagtcgtggcttgtgagccgctcgaaatactggaagatcggcttgccgatgccgaacacgcgcacgaagatgacgggcagatggatcatcagaatgttgcctggcatttcggctgcgcggctgatgaggtagccggaggtgaacatgagagcgccggcgaacacgaaggtggcaagccccagcaccagcgccagcaccagcgcacgccgatactgcttgaagaacggtttgatccaccggtccgttttgagggtcgttgtccagctgccgctcatcgcttgtccgtccattcggatagggcggcaagcgccgcgaagctttcgttgttcgagcgcaggtcttcaagcgttcccgtgccagcgatgcggccgtggtccacgacgaggacctggtccatgttgtgcatccagtgcaaccgatgcgtcgcgaagaagacgaggcggccttccataaggggaagcatgcgctctttcagatccatttccgtttctatatcgagatgggcggtgggctcgtcgaacagcaggatcttccgcgagtcgtcgagaaacgcccgcgcgagcgcgatgcgctgcgcctgtccgcccgaaagcgggcgggctccttcgccgaccacggtatcgaggccttggtccagctctttgacgagatcgtccaggccgacgatcttgacggctcgggcgatgtcttctgccgaggcgtccgggtggtagaacgcgatgttgtcgcgcagggtggcgtgaaatatgtaggggtcttggggaatgtagatgacctgcttctgccaatcggactgtcgtagatcggagaccgccttcccgtcgatgtcgatgctgcccgtatcgggagtgcagaagccgccgagcacgttgacgagcgtgctcttgccggcgccgctcgcgccgacgatgccgtacttcttgaagccgcatgcctgcagcgagatgttgtcgagcgtggggtgttcggcgtaggcaaagccgatgttgcgcaacgaaagcttcgaggtctccgaccaaggcgcaaggggcgtttcggctggagcatcgtcggacttgccgacgaggttgaggatggaggaaagcgcgttctttccgtcgagcgatgcgtggtaatcggaagcgaagttcctgatggggcggaagtactccggtgcaagaacgagtatggccagtgccgggaacagcacgagcgttccatcgagcagcctcatgcccagcatgaaggcgacagctgcgatcgacagggtcgaaaagaggtcgagcacgaagctcgagagggtggctacgccgagggttttcatggtggcaatacggaaccgctcgcttacttcgaaaatcgttttgccgtagccttggctcgcgccgaacagcttgagcgtatcgatgccgcgcagcgtatcgatgaagtggttcgacatgagctggaaggtgcggtgctgcttcgaggccttttccttggcggtgcgtccgagaatggccatgtagaggatgatgaacgggaaggcgacgagcatgatgacgcccgatacccagtcgagcggaaacgccacgataagcaacatgacggggatgacgacgagcgcgcacatcttgggcagaatgaggcggaagtacgtttcaacctggtcgatgccttcgagcaccgccgccgttacgcttcccgtgccgttttcctgcacgagcttggccttcgaggtgaatatcttgcgcaaaagcttggagcgcagcgcatcggcctgttcgtaggcgtagcggtccatgaagctgtcctgcgcatacgttagagcctgcttgccgacgaagcaagcgaagaacagtgcgatccagagcgcttggtcggacagggcgcctccgtaccagaggttcgtgatcgcgcttgagagcgaccatgcttcgccgataacgcagagcgcttggcctgcggaaagagccgacaagacgctgaagacgcgcttgatgcctggcagctcgaaaaccgctttgtcgatcatccccgccatgccagttcgtacgacccccggttgctcgcgtttttccgaaatcaaagtgtagcacggtatatgccgccgcgccccgatgatgctttgccgaaaccattaatgatatttatatagtagcatttagagggggagggcgctaccgatttgttgggcttcattcggtttcgctgtcgaagcacgcggttccaagctttttttgctcggcataccataagcttggggcgacggcccaagcgcgctcagtaccccataagcttgggaacaacaacgacgcagaacaaatacacgcagaggataaccagaagcacgatggtagccctgcggtcgagtctgacgttttcgctttgcgaaggatcctttgccatgagttcgttttcggcgttgcggcgctccctgctcatcgcgacgaacatcaagacgatgtacgcgatgagggcaaccgtgctcgctccgcacaaggtcgccccaagggtgtagagcgtttcgttgccgagaaaaccgccgaagccgatcatcgggatggtcgccgacattgcgcaggcgatgatcatggcaaccgaaacccgccgtccgagcttccgctgctcagggcttgcgtattcctcttcggggacgaagttgttgcctgcgatggatcggagccactgcccgtgccagtatttccacgccaagaccgcgaagagggctgcaagcgcaacggagataacgagtccgattgcgagtgcgccgatgtctccttcgtttttcatgatgccccttctggatgcgcgactgactcatggcggtggtctgggattacgcagttcgcctggtttgcagtatagcaaaggggcagaggtttttcgggcgcggttccgctctcgccgctgggggtttctcatggttggcgttgccgggtttctgggaagggcatccctgttgaaaaagggcccgaaaatggcggtcaaggcaagcttctgtcgctattatgggcggctgatggacgtttcgggcgtcttttaagcgagggcgcaagcgtttccccagatcacagattggaaacagattactgatctggttcgaaattgacggaagcgtcccttgaccgccattttgccagagctgtgcgcgattgcgatgccgcgctaaccggcggcgatccgtgatttagctgccgaagttgggaagcggttgccgaattgacacttgactatacctgtagggggtatatagtatcaaaaggaattataccccctgggggcatatgaagcgaagcggcaaaggatgcgacatgagcgaacgcgaaacgatcgatatcacagccgatgcacggcgagactcgcgcgcggcggaaggctgctgccaccataaagaaacgccgcgcagcaccgaatttcaagccgatctgcaaaagcggctcaaccgggccatcgggcagctcaacggtgtgaagggcatgctcgacgacaatcgctattgcggcgatgtcctcgtgcagcttgcggcggtcgaaagcgccatccgcagcatatcggccatgttgctgcaagaccacctcgaaacctgcgtggtcgaacaggttaggcagggaaacgacgaggtgattgacgaagtaatgcagctgatgaagcggttttctcgtctctagcgcgggttggaaaccgagaaggacccttctccgagagcgccgagcggcatggtcggctcgcagggcgcggcgagtcaaggcgattcggcgaataaggcaaggagcgaatctatgaaacagacattcgacgtgacgggcatgacgtgcgcagcgtgttcgtcgcgtgtggaaaaaacggcaaacggggttcccggggtcgagagggccaccgtgaacctgctcaagaattcgatggaagtcgattacgacggcgcacctgaaacgcttgccgccgtcagcgccgccgtgggcaaggcgggctacggtgctcagccgcgcgtcgagacgtcagtcggtggctcggctgcttcgcgagcgtccgcggcgccggtcaatgtggcagccgaagaggccaaagcggtcaagacgcggcttatcgtctcattcatcttcaccatcccgttgttctatctgtcgatgggccacatgttcggatggcccctgccgaacgtgtttttgggcgatgaaaacgtgctcgtgttcgcattcacgcagttcttgctgcttttgccggttatcttcgtaaacttcaaattcttccgggtgggtttcaaatcgcttttccacggttcccccaatatggattcgctcatcgcgctcggctcgacggcctcggccgtgtacggcatctacgcgatctacaagatcgggtgggcgctcggtgcgggcgatatgcacgtggcgcatgcggcggcgatggatctgtatttcgaatcggcggcgatgatcctcacgcttatcaccctcggaaagtatttcgaggcaagggcgaagggcaaaaccaccgatgccatcgccaagctcatggatctttcgccgaaaaccgcgacgcggctcgtcgacggtgcagaggaggtcgttcccgccgatagcgtgcgcgcaggcgacatccttgtcgtgaaggcaggggagggcgtgccggccgacggcgttctcgtcgaaggggcgggtacgctcgacgaatcggtgatcaccggtgaaagcgttcccgttgagaaaggcccgggcgatccagttacgggggcgacggtcaaccggtcgggctggttcaccatgcgagccgagaaggttggcgaggaaacggcgcttgcgaacatcattcgcctggtcgatgaggcgacgagctcgaaggcacccatcgagaagatggccgataggatctccggcgtgttcgtacccgtggtcatcgtgattgccatcgtcacgttcatcgtgtggatggtcatcggcggcacgctcgaagcggcgctttcgcatgccgttaccgtgctcgtgatttcgtgtccgtgcgcgctcggccttgccacgccgacggccattatggtgggcaccgggcgcggcgcggcaagcggcattcttgtgaagtcggccgaagcgcttgagacggcgcacgacatcggcacggttgtgctcgacaagacgggtacgatcacgcaggggaaacccgaagtgaccgatgtgatcgaggttgggcttgacgaggcgtcgtcgagcggcggcatcggcgcgaagggcgcgagcggtcccgcatcgttcctgtcgtttgcggcgggcatcgaaaagcgctcggagcatccgcttgcgcaggccatcgtgagctacgccgatgcgcagggtgtcgagggcgttgcggtcgaaggtttcgagcaggtgcccggcgagggcattgcggcgacggtcgatggcgaggagtgccttgccgggaacctgcgcatgatggaggcgcgcagcatcgacgcctctgcatatgccgatcgcgctcaggcgttcgccgacgacggcaagaccgtgctctacttcgcgcgggctggacgcctggcgggtcttatcgctgttgccgatgtggtgaagcctacgagcaaacttgcgatcgacgagttgcggcgcatgggcatctcgacggttatgctcaccggtgacaatgagcgcacggcaaaggccatccagcggcgcgtaggggtcgacaccgtgattgcgggcgtgttgccgcaggataaggaaaagacggtgcgcgatctctcctctcaaggcacggttgccatggtgggtgacggcatcaacgatgcgccggcccttgcgcgcgccgatgtgggcatcgcaatcggggcgggtaccgacatcgccatcgagagcgccgacatcgtgctcatgcacagcgatctggccgacgtacccgccgcgatcgggctttcgcgggcgaccatgcgcaacatcaaacagaatctgttttgggcgctgttctacaacgtcatctgcatacccgttgcagcgggcgtgcttgtgggaatcggcatcaacctcaaccccatgatcgcggctgcggccatgagcttgagttcggtgtgcgtggtgtccaatgcgcttcgcctgcgcacgtggaagcccgcattcgcatcgagcggcgaggtcgaagctccggtcgctggtttggctggcggatcggacggtgcggttagcgcgaagcaggatgtcggcaccgaagcgaaaggcaataccgagaatacggaagaaacaggaaaggacgtcatcatggagaaaactctaagcgttgaaggcatgatgtgccagcattgcgtggcgcatgtgaagaaggcccttgagggaatcgacggcgtcgaggctgccgaggtggatctcgatgcgggcacggctacggcgaggctctcggccgacgttgccgacgatgcgcttatcgccgctgtggtcgatgcgggttacgaagcgaaaatcgcctaacgggctggattcaagaggctcaggcaaaagcggatgttcggcaggggcttgcttcgatggcattggcggccaggtggtgcatgtggagcatgggcgtgcttgaccggaggtctcgatagcgagcgtgcgtgagcgagaatgcgaccgcggatacaagtgcggttacgaaggccgtcggcaacgcgtgcgccgcaatcgggcttgcgcggaacggaaaaccgaggagaacgcagcgaagcggctgctttttggaagactccgatggcgtgcgcagccgtgagctccttccgttccccatcgaaggattcggctgcgtgcgaagccgaatcccgctccgtggaaaaccgttcgcttccgccttgaagctccaattcgctgtcagggctgcgccgcggggcggcaggttggggttgggccgcggagcagggcgggagcttgggagcagccaacgagccgaaaagtcgtataagccacaattgtcacgcgtcacgttacatggtacaattacgttgtcgaaaggatgcctcgcggtgattaagacgtttgccgacagggaaacggagtcgctgttctgcgacggctgcgcgcgtaagcttccgcgcgacatatggtcgcgtgctctgcgcaagctcgatatgatcgacaacgcgtatgcagtcgatgatttacgggtgccgcccggcaaccgtctccatcgactgcagggcgaccggttcggactctactcgatctcgatcaacgatcagtggcgaatatgtttctccttccgcgaagaaaatgcttacgacgtagagatatgcgattaccattgagagtagggaaaaggtcatgaatgccaaggaaatgcttctcatcgcccgcaggcccacgcacccgggtgaaatgctgcgcgaggaattcatgcccgatttcggcttgagcgtggcggcgcttgcgaagcggttggcggtatcgcgccagtcggtcaacgaactggtgcacgagcgtcgggcggtgagcgccgatatggccttgcgtttggcgcgggtgttcggtacgactccccagtactggtcgaacatgcagcgcaatgtggatctttgggattcgcttgagctgcactctgaagaaatcgaagagcttgaaccgctgtcgggagcggcggcgcagtagggcggcgacgaaacgggtgtctggcggctttctcggcggcagggtcgaactgtcggttaatccttctgaacggctgaaaggcttttgccaagcggatttgacagagttcccaagggatttgcttttcttccgcaatgcgcttgcctcacaatggagaccgtcgaaaggagagagcgtgctcggagagaagcttatgaggctgcgccggaaacaggggttgagccagcaggaggttgccgatctgctcggcgtgacgcggcagacgatatcgaattgggaatgcggtcagggctcgcctgcgctcgataaagccgcagagctcgcgcgtttgtatcatctcggtctcgacgacctggtggctgacgaggtggaagtggtgatggcacctgaatctgcgcccaaggatctgcacgttgcgcgaacgcttgtgggtaagatctgcaggatttccttcaccgatgacatgctgatggtagtggttgggtcgggcgatcctcgtatgacggtgctcgatgtgagcgaccagtggctgcgcgtcgaatacgagcgaacaaatgcgatgctgaagaaagagaccgtggtgcagctgatcgacatcgatgcgatcggcagcatcaggatatgcggtgatgcgtcatgaccgaaatcctactgctggtcatcgccatcacgctgctctacattgcatggaagatacccaagaaccccgagcggaagaaagaggaggcggatacggcttcgaggaaggaagcgctgatcgtgcagcagttgcccgccctcaaaggcaagttctgcgaattcacggcgaaggatttgaattcagcgttcgactacggactgtcaggcaaggggaccgtcgtcgacttcgacgatgtatgggtgctccttgccaccaatcggaaaaacgaagtcgggcgtatggtgcgaatcgccgacctgagcgaagtgatcgaggtgcgcgagcactgaggctgccgtgcggcgcgcggcaggtgtccaaccgcgtggagcgcttccgatttgtcggtattgtgcataaatgcggcgcaagatgccagaccccctgtttttttgggggggggtgcttcgcgcggcgccagtgcgaagttttccgatacggtgtgccctgcgtgcggagcggatctgccggcgggggcgggagttcccggcgcacctggagcgcccgacgccccgaaggcgccaggggcacctggggttcccggagccccgaaggctcccggcgcccctggagcggcgcaatcggaaaagtaaaagatcgaaccgcgtgaaaaaatgcttcctgaaaacgtcggcctgatgagggctggcgtttttgcttttgtccgcgaactcgattcggcatgccagccttccggcggcagctgcggatgcttttcgggaaagctctgcgcgatgcacctgcgcatgctattggatggtgggatgcgatctcggggccgtgagtctcgaccggcataagaagggcatcatagcaatttcaacaggtaatatggagaactcttcataaaataaacggtacctgttagaaatgtcttgataatcaacaggtaccagtttattattgatgccatactacaaacggtacctgttagaaatgttaggagcacgctcatggaaccaacgatgaacgtcaatatgcacttgtatgaaaaactggcaaccttgcagcatcttctgatgcgccgtcggttcgcccgtaaaggcgccagcccccttgccgatcccatgcgggggcaggggcggatcctcgccctcctgaagataaaggacggggtgagcaccaaagacatgtcaagcgtattgggcatccgcacatcttccctcaacgagcttctctccaagcttgaatccaaggggtacattgtgcgggaacagtcggaagaggataagcgcgtaatggtggttaagctgaccgaaaagggccgtgaagtcgagcagccgtcgggtgccgcgggaggagccgacatgttcgattgcctgagcgatgatgagaaaaacgcccttggcgagtatctcgatcgcatgattgcccatgtcagtgccgagattggcgattgcagtgaggattttgaggcaatggcccgcaatcgcgagaaggcgttcaggaagttcttcgccgacggtggatgcacgaccgacgagggcggcttccccccgtttggggcattcgggccgcatgcgggattcgggggtttcgatcctcgcggcggtggacggcacggcggcggacggcatcagggcggtttcggacgcgaatagcgaaaccggcgacgtttcagcgtagcatgatgattatggaatccggtgcggctgcaccgaggcgggcaggaggctggcgtggaagacaacatgagcgagttgcagcaggcgaacggcgcgggaaaagcatccgtcggcttgcaggaagaggatggctactctcgggagatcagagatttggcgttgaatcttgtcatgcgggttccctccgccccggcggcgctgcgcgcggcttccaacgatgatcgtctggcagcggtcggcgaggcgaccatccgactcgccgaggccaaggacatcgagacgatttgcgcgtttcgttgcgctcaatcgatggagtactggggcctctcggcgacggaggaatcgcatcgtttgttccgtgctgaaacggaggcgtatgtacgtcgcaacctcgacaaggtcgtgcatttcgcccttgtcgaggttgccggcgaagcggtttcgatgtcgggacttgaaatcgtcgatcggatgcctgccatcggcgttcgcggtggggcggagcggggtgcgacggtggttgcgtgctatacgcttccccagcaccgaggaaagggctatatgagccagatgctgtcgatgtggtcggcgcttgctccgatgctcggtgtcgatgccgtgtacatcgaaagccataatccgtcgatgcagatgcttgcgcttgatgaaggctacgactacgtttccgagaagtaccggctcgaccttgcgtcggttcgccgggcagatagcgccgtgcagctgggggccgtgggctcggttccggaacctgcgtacttgccggccggatagatggcggcccaacgggatatcgaatccaaaagcgtcagcgcggtacgggaatgacgacattgagcgtgaatgttccgccctcggcgtcaaagctcatggctccgccgtgtttcctggctatcgcgtcgatgctctccatgccgaacccatgcctttcgctgttcggcttcgtcgttgcaaggcggccgtcttttttcgggaggtcgcctgcgtatcggttcgcgaggcgcatgaccatgaggtcgtgatcgtaggatactttgagcgagatctcgcgcagtgattcgtcatcaagggggattgtcgcttcgatggcgttgtcgagcgcgttgccgaacagcgcgcaaagctcgaagctgctcatgaaattcaggcggcttgcgtcgacgtagggaacgagcctgatgcgctcacgttggcatagccccgctttatcggcaaggatgatgtcgactgcctcgttgccggtttcgacgaatgcttcgaagggggagatggtttggctcatgccctcgacaaaagcccggacctgcctgatgtcgcgactctcttcaagggtccccagataatgcttcaggtcgtggtactgcctgcgcactgcgtcgacggcgctttttttcatcgcgtagtgttggtgctgctcgttgagcagcgcctccatctgcagcagatccgctttcttcaccaccgaagacagattggctgcgttgactacgatgatgacgataatcgagcctataagcatgagcaggatgagcaccatatcctgatagaggggctgatcgggattctcgtaagcgtagctgcgcgagcgaaggaacatgaaggggatgatgggcagcagaatggaaacgcattgagtccatgaaagattctctgcgccgctgtcgaacagccaacggcttgcgatgaatgcgacgatggagagcactgcgaaggtgagcccgaaattcaggagcgtgacggcgaggggggaccattgcgacagcgcgcctacgatcggttgcatgagcaggtcgagggcgacgattttgcccgcttcgacacagagcaggaacacgcagctcacatagaggttctgctgtctgctcgagcatttttcatatgtgaggtagacgaagtagccggcaaggcaaagcacgaaatcgaggtagaactgctgatgcaggtacgttatcagcatttgataggcgatcagggcgattgcggcggcggcatctttccatccgaatgggttcttgctgcccagaggcttgatgagaaagaagaacacgaggcattcgagcaggcagggcacgtaccagatgatgcccgtcgtttccaggaagtatgcggttatcacagaaaccgtcctttgtaatcggcaagcaccttcatgaagaagcgcttgcggtgcttgcttatgggaatggccgtgccccgcacgatgacgtctttgggcgtgaccgtatcgacgtaggccaggtttacgagaaaggacgcatgcacgcggaagaattgaccggaatcaagctttttctcgatcgcttgcagcgcttccgaacaaaagatgctgttcgcatcggtgtggacgagcgatcttttctgggacgtctcgacgtacatgatcttgttgctgttcacgaacacttgctcgcgaccgcttcgcagtgtgacgaaatgctctttcctgtgttcgattgcctggacggctcgtgccatgtgggcgctgaaaaggggataacgaaggggcttgacgatgtaggcggttgcgttgacggtatagccttcgagagcgaattggatcatgttggtaacgaagaagatgatgacctcttcgtcgcgggcgcggatggcgcgcgctgcggagagcccgtcgagtccgcccatttcgatatcgaggaatactatatcgagatcgggagggtagttatcgactatttccgcgccgtcgcgcagcactatggcatcgatgctcgcatcgttctcgtctgcgaaccgatcgagcgcttgctgcaatatcagcgcatcgcgctcatcgtcctcaactatgcagatgcgaatggaatccatgatcctcccgagccgcgacggcgtttgggaagccgtcatcgtctgagcaaagtatagcaagtcggcgaaacgccctttggcccaatcgttcctttctcgcgcccaaacatccgatatccgttgaatcgcgtggggtcgcttgtcatgatgggcgcgcaacggggtcggcatgcggtttcgctgcgcgtttgctcagacgcatgcgcgtcctggtttgggagccgtgatgagcgtgtcgaccgaaaacaagagaaggggtttagatatgggcaattccgaattcaagcagagtgcgggactatcgcgtcggtcgtttttgatgggcttggcggttacgggcacggcggctgtgggcgccggtcttgtgggctgcagccccagcagcacgggtgcttctggggcggaagaggcgccggcgggcagtgcggcgagtcccgctgcatcggcgtcgaacgtgggcgccgatgcgagcggcaacacggtgtactactccatgcgtcgcgattggcttggggaggcgccgagcatttcggacgatgagataaccgaaacccatgaagccgatgtagtcatcgtgggtgcgggttacgcggggtcgcagtgctttcgcatggcgtgcgagaagggccttacctgcatcgttatcgacacgcagcaaaaagacgggttcgaaacgtacggcggtcagctcggccactttaattcgacctggcaggaagaggtgctgggcgttccgaaagatacgttcgatccggttgatttcatcgatagctaccagctccaatccgccggccgcgcccatcccgatctcatcaagcagttcgctcaccgcaatggtgagatggtcgattggatgatggagctgcagcctgacctttcggcggtgacgggagtcaactcgctcaactcgagcggcacctacgattacaagaaagggtacttctggacgtatccggcggttatcaatcttggctcgggagcattcgagacttcaggcgccttctgcaccgcatcggttgacaaggggatcgaagcgagtcccgattcgcaggcgttttacgggtacagtgccaaggtgcttgtcaaagacggcgaggctgtgacgggcgtcatcgcccaaaacgatgccgacgagacgtatggcaagttcacggccagaaagggcgttgtgctggcaacgggcgatttcagctccaattctgaaatgtacagcgctctgtgcaccgaggtccaggaatcgaatccctataccgagctcgtgggatcgggccgcgatggctacggcatccgcatgggcatgtgggcgggtggcgtgatggagctcggtccgcgtgcggcgatgggcggctgcacgtcggcgcttcccatgggcacgttcggggctgcttcgggtttgtggatcaacaaatacggaaaacgatactgcaacgaggcgttcggcgtgccgttcgttgccggcgttcagtctgcgcgccagcccatcgacagcaatatcatccaggtatgggataacggccattggcgcgagttcgtgcagaaccaagcccttggtcatttcaacctgagcgacataagcgacgcgaagatggacgagctcgccgctacgctgcaatccgccgtcgatgcgggatctgccggtgtgaacgagagcctgtttgctgccgatacgcttgaggagcttgccggatatctgggattcgagggagaagccgccgacaacttcgtcgaagccgtgcagacgtacgattcgtatgccgctgccggcaaagacgaggattatgccaagcctgccgatatgatgttccgcatcagcgagcctccgtactttgccgagaagcttcagcgcaatgccaacatcgtgcttgttacgcttgcaggtttgttcatcgacggcgacggtcggtgcctcgatcagaacttcgagccgatcgagggcctttacgcgaccggcaatgcgtcgggcggccgcttccccttgcagtacaccgctccgatgaacgggatcagcatcggatttgccactgtgttcggagcgcttttgggcgaacatctggccgaacaggcgtaaaactcggttcgttcggtgcatttgcgatgatcgggtgctgtggcgcgcccgatcatcgcttttgccgatgactgcttttcggatacgctgtgaaatgaagagaggatgcggcatggctgctgacaaaagggcgattgcgttgcgcctgaacattccgtttcgaccggctccttgttcctatcgcggcggcgtcacgcttcctgcgggggatgcgcggcatcggcgcgcctacttcgaagcgctgcatcgcgaagtcgaggcagccgcccctgatttcgacgattgcatcgtttctgccgtatgggtgggcgaggggatcgcaggccatatgtgcgatgagggtcttgccgagcttctgcgcgcgctgccgcggatgtttgcgatggcggatgatgtggaaatcaccgtgacggcgcatcccggcatggtgagcgtcgagactctcaacgcatgcaaacgcggacgagttacgaggctcgccatagagtacgatacggcaagcccctccgaatggacggcgctcgggcgctttcttgatccatcggctatggatacgacttctatggtgctgggaaggtcggcccgcgaaacgctggctcttgatttcagcattgcgatcggagcgccggggcaaacgtacgcatcgcttcgccgcagcatcgaaaaggcgatcggcttcggggcttcgcatgtgacgttgcagatgatcggccaagatcggctggacggagcagcttcggcacatgcgtctcgaaacgaaacgcacgtgcaattgctcggttatgccacagccttcttgaccgcgctcggcttcgatcaataccttccgcggcttttcgctcggaagggtgcatcgtgttgctatgcgatgatggaatcggggggcagcgatattttgggcttcggtctcggggcaaagacacgatttctgggggcgcttgccgaaaacacttccgacccgggcgtttaccaggcgtactcagctgttcccgaaaggtgcatagcgtgggtgatgcagccttctaccgcttcgtagggcatcgccgccgcccatcgctgtaggcatctctcgcatgtaaagtattctccgttaagcgaaatcccagccaagacgcaaagaagtaatggataatactcacgatacgctttattatggtaaagcgattgctcagtagtacgaaacgcatgtggagcatgcaaagagggagggatacctatgaacatcaagaaaatgggcgtgttcgccgttgccggcgcactcgtcgcggctcttgcgctgttcggctgctcgtcgggtgacggcggtcaggcgaagaccgaaggcggagattctgcgggaaccgccgagtcgggctatgcgctcatcaacgacggcaagctgaccgttgccgcatcgctcgattttccgccgttcgaaaacctcaacggcgatcagcccgagggtttcgaagtcgagctcatgcaggcgctcgctgaagaaatgggcatcgagtgcgaatacctgccgtccacgaagttcgacaccatcgtgccgcttatccagaccggcggcaaagccgatgtgggcgtgtccggtatcaccatcaacgatgagcgtctcgagcaggttgatttcaccgatccgatctgcgatgtgaaccagggcatcacggttctcaaagaatccggcatcaccgaggtcgaccagcttgagggcaagaaggtcggtgcccaaaccggcacgaccggctacgagtgggccgccgagaacatcaaagatgtcgagatggccggcttcgacgagatgaccgctgtttacgcggcgctgcagtcgggtcagatcgacgccatcgccgtcgatcttccggtcacgaactactatgtgaagacggcttacactgattgcgaagtcatcgccgagattccgacgggcgagcagtacggcatcgctgtcagcaaggaaaaccccgagctcaccaaggcgctcaacgatgcgctcaaggcagtgcgcgatagcggcaagtacgacgaaatcgccgctaaatggcttcagtaaccaacggatagggtgacgatgcagaccgctattcaatttgcgcggaaacacattcttggcgccgcggcgattctcttcgccgcggcgctcgccctttcgttcgccttgccggtccaggcgcatgcccttgatgtggagcgctggaccgccaagccgaacaaagacggcgacagcacgaccgttctgggcgcaacggctacgcgtgttacatggcagggtcagtctgccgaagacgaatcggttacgggtgtggttctcgaactgcccgaaggctcgacggtcgaggccgaaaacgtcaaggtgacggtgctcgccgggctcgaccgcctggatgtcgaggccgaagccaacgtcgacggctcctcggttgcggtggcgtttcccgagccgacaccggctggctcgcttgtcatgatcgagtgcaaccgaacgcttctgcccgccgagggcgggacgtacggggtggctggcagttacacgacggccgatggccagcagcacgagatgcccgcaaccgatcagatcatcaccgtttcgagcacctcgccggtcgagcaggcttcctcgtggcttaacgagcaggagtgggtcaaggcgtggaactccaacaagttcctccacctcttcttcgatcccgcgcttatcgtcacgtcggttcccgcgctgttctcgggctggctcatgtctttgggccttgtcatcgtcagcttccccttggctattccgctcggtctcatctggtcgtttcttcgcatggcgaaacatcgcctgccgcgcgccatcggggcgacctatatcaacatagtccgtggcacgccgctgttcctgcagctctacatcgcgtttttcggattgcctctcatgggcgtgcaaatggatccgtttatgatgggcgccatcgtccttatcatgaactcgagcgcgtatttggctgagatattccgtgcgggcatccagtccatcaacaaggggcagtcggaggccgcccgctcgctgggcatgagcggcatgcagaccatgttcttcgtgatcattccgcagacggtgcgtcgcgtcattccgacgatgacgagcgaattcatcctcatgtacaaggacacgtcgcttctggccgccgtaggcgtcatggagttgatgatgtacgcgaagaccatcaccgcagctacgggcaacgtgactccctacatcgttgcggcgggattctaccttgtcgtgaccattcccatgaccaaattcatcaactcgatggaagcgcgcatggcgaacggccgccgcaagcacaagaaggccgaggccgctgccgacggctcgacgggcgcggtgttcgagccgggcaccgaggccgccgttgcgcggtccatccgcatgtccgaaacgtttgccggtccgaccgaggccgatgctgcagcgcgcatcaaggaagacgcgcggcgcaatggcaaccatgtcagtcgttagaggtgagcggatatgagcgatcagaataacgaaatagtcgtccgcatcgaaggactgcgcaagagcttcgacgacaacgaggtgttgcgcggcattgatttggaagtgcgccgcggcgaggtggtcgtcatcctcggaccttcgggttcgggcaaatcgactatgctgcgctgcgtgaaccttttggagaagcccacgggcgggcgtatattcttcgaagacaccgagatcaccgcgaagaaaaccgacatcaacgccgtgcgcgccaaggtgggcatggtgttccagagcttcaacctcttccctcatttgaccgcgaagaaaaacgtcatgctggcgcagcagaaggttttgaagcgcaacaaagaggaggcggagcgcattgcgatcgagcagctgaccaaggtcggcctcggcgaccgcgtcgattacaagcctgcggagctttcaggcggccaacagcagcgcgtggccatcgcccgcgcgcttgctatggatccgcacgtcatgttgttcgacgaggctacgagcgcgctcgatcccgagcttgtgcgcgatgtgctcggcgttatgaaagagcttgcgcgcggtggcatgaccatgatggtcgtcacgcacgagatgggctttgcccgcgatgttgccgatcgcgtcatcttcatggatggcggtgtgatcgtggagcagggcacccccgaagaggtgttcgacaacccgcaatccgagcgcacccaagatttcctcgggcatatttcctaggcgaacaaatacgctttctgcaggcggcgactgtccatgcggcagccgccgcctttgcttagggcggcttcgtacgccgagcgggcggtggccgccggacgacggcggtcgttgccgcggtttttggttgcaaggcgatggccgggtggtatgggcgatgcttgcgaggggctggttggcttcgggaattccgggtgcggcgtatcggtaaaaaccgtgcgttttgagatcgcggaacgcttcgcaggctcgccaagagtttaaagtgctagaatcggcccattcagagccaatgcaggtgccctttgctctgcaaagcggtccactgggaaacggtgccctcgtttcctttaccatgcttgcaagatcctcttaaacaaagggtagggaggatccatgtctatttcatctgcgcatgcaccgatatccgcttcgcattcatgctcgtcggaggttttcggtatctatttcggatacaaaacggcattgcagatagtgcgagcagcgaggggccggccgcttaccaaattgagcggggcccgccatgcggttcccgagcgggcgctcgggaaaagccggatagaggaagcgatcaggcgggtggaatcggcttatctcgatgcccccctcgaaagacccgctcatgtcctcgtcggcagtccatcgagatgcaggccgtcaggcgagtacgcgctgcatgtgtgtacttctcgcttcaagggcgattcgtttctgcgccttggcgatggcatttgcgcgagcgctcccgctcttgcctttattcaggaggcggctcgttgcgaggacgagatatccctcatcgaacttggttttgagctgtgcggaacgtatcagagttggcgaacgggggtgccgacgcgctatcgggcgaagcctcttgcctcggttcgcgcgctgagcgattacgtatccgataatccgtccgtgaggggttcgggaaaggccgcgcgtgcgcttcgctatcttgccgacggatcggcgtctccgcgcgaaacgacgcaggctctcgttttggggttgcctatgggatacgggggccatgggctcgggatcccccgtatgaactacgaagttcgcgcgaacgctgcggcgcgggcgatatcggggaggtcgagctttcgctgcgatctgtgttggccggaacacaagatcgacgtggagtaccagagcagggagtggcacgaaggggaggccagcagactagccgattcgaggaggacgaatgccttgatggctatgggttggacggtgattggcgttaccaacgatgagttggaaagctttgctgcgacggaggggatagcgcagacgattcgccgacatcttgggaaacgtttgcaggttcgtgtttctgattaccatgcaaggaagctgaagcttaggcggcaactgtgccttccttcgaacgaatgaggtggttcgagtttttgaagcgcgccctagaacttttgaaatgcacgctttttgtcgaagtgttgcgtttgaggtcgtgggtttgcgggttggggtctggttccatattgccggagatgcgttttcccaggtggcgaaaatcaagtggtcggcagggatgcatgcataggtgcgccgaggacgattaaacgcaacacttcggcgaaaagtgtgcatattaatatattacctgttttgtcggaggtgttgcgatggcgtaacagtccgatgatgcggcatggggcgataatgcggcatgggacggcgctgcggcatggggcgacgctgcggcatgggggagacgacgcggcgaatggcccgaaccgccgcttgtctggctgtgggagagattcttacgccagggcatataatggacgcttgaggatgcgaaaggacggttgcccggtggcacgaaaaattctcattgtcgaagacgatccggacatcaacgctttgctcgcaaggatcatgcagcagcaaggttacgaaatcgtccaggcgtattcgggtaccgaggggctgcttcgcgtcgagggcgatgcgttcgatctcgtgctgctcgacatgatgctgccgggcgcagacggtacggcgttcgtgtcgcagctgcgcggcgagctgcgatcgggtacgcccgtcatcgtcgtgtcggcgaaggcgggtctttccgacaaggtggacatgctttcccttggagccgacgactacatcgtgaagccgttcgagcccgaggaggttgccgtgcgcgtgcaggcggtcctgcgacgcagcgagggcacatcgcacgccgccgcggaatccggtgatggcgaagaacgctacgtcttcaaggatctggagctgaacgcggcgacgcgcagggtgacgctcggcggatgcgagatcgtgctcaccgcatcggagttcgatattcttcgggtgctcattcaggctcccgacaaggtgttctctcgagaacggctttacgagatggtgtggcggagcggctattacggggaagacaacgccatcaacgttcacgtgagcaacattcgcaagaagctcgcagcggtgtgccctggcgaagagtacatcaagacggtgtggggcatcgggttcaagctttcgtgatgcaccgcacacccgctttagtgcgcagtgcccccgctttcgcacgcagcgtccattgcgagccgacggcctctcggtggctcgccctggctgcgcgctcgcatctttacgatttccttagacttctttgaggacttattaattgctcgaacggtacagttctcccatgcaatcggagtacggaagaaaggaagaaccgaccatatggatgcagtgatagaaacacggggtctgacgaagcgctacggtgatttcgccgccttggacggcgttggcgtttcggtgcgtcgcggtgaaatattcgggcttatcggcgataacggggctggcaagacaacgctgttcaagctgttgtgcgggctgtcgtttccgagtgccggcgaagtgcgcctcttcggcgtaacggaacaagccgagctcgaaagacagcggtcgcgcataggggccatcgtagagcagccggggttctacccgaatctgagcgtagagaaaaacctcgagtactatcggatacaaaagggtgttccgggccaaggggtggtttcggaactgctggatctcatgcggctcacccatgcgaaaagccgggcctgcaaagacctttcgatgggaatgaagcagcgactggggatcgcgatggctcttttgggcgaaccggagatcctcatcttagacgaaccgatcacggggctcgatccgagcggcatcgtcgaggttcgagcccttttgcagcgccttaaccgcgagcgcggcatcaccgtcatgctttcgagtcacaacctcgccgagctcgagcagctggcgaccacatatgcgttcatgagccatggacgcatattggagcaggtgagcgctgagcgtcttgttgcgcggtgcgccgattgcatcgatatcgcggtgagcgatgccgagcgctacacggcgttgctcgagaaagatctcgggcaggagcattatcaggtgcttcccgacaagacggtgcgcatcttcgacccgcagctcggcatagaggcgtatagcgcgttagcgagcgagcaggggatgggcatcttcaagctcgaacggcatcgtacctcgctcgagcagtactacttgagcctgaaggaaaggggcgccgcgtaatgatgaactatctgaaaagcgagtggtatcgcgttatccacggcagcgagctgtaccgcatgacgggcattctgtgcgcggttgtgctcgcgatgaacgttcttctgtatgccatgacgtttacagacgatacgtttccctatgcgacggtgcggttctcgctcagcaaccttatgtatacgctgactgcgctgttcgtgctcgggagcgtgctcgccgccatgctgtacgccgatgaccgaaagaacggcacgatgaaaaacgcgatcgtccacggttgttcccgaacgagcctgttcatcggcaagtgcatcgtttcgctggcggctgggtttatctgcatggtggtcgtgttggtcgtctatattgggagcgcagcgcttttgctcgagggccctgccgtagagccttcggtcgatttgctggttgccatcgtggcggcacttccctcgactgcggcgatcgtggttcttgcggtggcgctcgacgggttcttttcgaagacgaccagcgctgtggtcgcgttcgtggccatcgtgttcgtcattccgcaggcaattgccatcgtcggcatgcgttacgaaccgattgcggagttggccagctggttgccgtcggttttgcacggttacaacgtgggcgtctttcctttggatttcgccaagccgtgggagcaggcgttcggatgggcaaaatgcatgatcgtcggattcgggtggttggcggtgttcgcgggcatcggtctttggcgggctcgccggatcgagctgtagaaaggaaggcgtatggtcgaagggattctgatcggtgctcttgtggcggcccttgcggctgcgggatacttcttcctgcggtactccctgttgcgccggtcgcttcgggatgccgatcgcgagctgagcgagatcgtggaggatttgggagagaaccgcatcgtcaagctggcagcacccgatcgtgatctggaggtgcttctcggaaccgtcaaccgggcgcttgcgcgcatccgaagcgaagcagtgcgttatgcgcggcgggaagccgatctgaaatcccagatcgagcgcatcagccacgacctgcgcacgcctttgacttcgattctcggttacttggcgcttgtggacgagcgcggtttgagcgaagagacgcgcgaatcccttgcgatcgtgcgacgcaaggccgattctctgcagcggctgatcggacagttttacgaactttcctgcgtgaggggcgaggattatctccttgacttgggcgaggtcgaggttgggcggctggtgaaggaatcgattgcagggcagtaccgcctgctttccgaaaccgggctcgatgtgtctgtgtctgttccccccgatgcggtgatcgcatgggcgaacgatgccgccgtcgaacgcgtggttgcgaacttggtgcacaatgcgggcaggtatgcgaagacggcgttcgaggtacgggtcttcggggattcagatgaaggcatcgtgctgctttcgtttgcgaacgacgtcgagtcgctcgacgaaggagatgtctcgcgtctgttcgagccgttctacatggtcgatggttcgcgcacgcaggaaagctcgggactgggcttgaccatagcgcagcatctcgtcgagcgcatgggcggcaccctgacggctcaaaccgaggtgcgcgacggcgcgcaatggctgcgattcgaggttgcgctcgccttggccgcctcgacaggcgtgaaggaatagatggtgcgctttgtcgcggagtgcgtgtacgtgcgcgatctggcaggtcgcgcacgtacgtgacggctgtgctgctagcgcagatcgactgtcgtgccttcgatgctcagggcgaccacgtcgtcgaagttctcgatggggctcacgaagtagagggttccctcctttgtgtcctcgttaagggaagaaccgccgcttatcgttttgccgacttcactggtcgagccgttgcggtacacgagctgcaccgcggcttggacgtcgtgcgggtcggtcgccgattcgtaggtgaaagagaggatgacgctgagcggcgacacttcgacggtgttgacgacgaagccttctcccggaccgggcagcgccgctcgcgtttcggccgtgagaatttcgacgctgtcgggcacggtgaaggaaacttcccaatccccctcgatcagggtgtcgaaggagtgcccgaagacgtgcagccggaggtacggcaggtcggcggcatcgacgcggaaaacttcttcttgatagtcgccaactgcctgagccgagccgtcgacctggcgtgatccgtaccgtgctccgtagtaactgccaacctcttcgcctgttcgagtgtcgatgaggtcgtacaactgcgccgacgcccagccgctgcttactgaatcggcggggttcatctgaatatggaggaagccgtcgcgataggcgatgttggagatgtagctggtgtcgagtccgggaatctcgacgtgcatctggtcgcggaccagcacctcctcgatgtcttcgggcgcggcaagcccgtcgctgaggaactccgtgctcacgcccccactgaaaccgcgttcggcgttccaatcgatcggctcgaatgtgccgccacggtcgagcaggtcagcgaggttcaaatcgtcggcgacgaggtcgtggtcggtcttgttcgtgtagatctgcgagagggacaacgtggcggtttcgccggatgcgagtccttcgcctgtcaccataagcgttgcggttctggtttcggggtcgaaagcgagagtctcttcgccgtaaccgtatggaccatcggcattctcgccgatcaaacgcataccgctcaagggcgaatcgccgaagaacaaatcctcggtcaggcgatcgccggttgcatccacaagatcgacgatcaggtagacggtgtcgccgtcgttgatcgccgagaccgtgtcgaggcgaatgccctgatcggtagctgtcgcgtcgacgggctgcgcctgttttgccacgttggaacctcctccgaagtacgagacgaacagctcttggatgcggtcggcgtaggtgaagcccgccagtacgacaagcgcggcggccgcaagcagcgcaacgaggcgcccggttctgcgatgcgtggtctcggaagcccgatcctctgctcccgcggttgctgctagcgctgcggtcggggcggccggcatggtgcttcgctcggttcggtcgcaagcgccatcgcgctgcgccgtctttgcagtggcgattttgccggcgaagcgcgcggcgatgcgagcggtagctccttcgtcgaaagcgtgctcgtaggccgcaaggtcggcgagggcttctgctgacaggttttcgagggggttcttcatggatgtcatcgtcggtcctcctgatcgtcggacagtaaaacgaagagggttttctttgcgcggtacagccggttctccacttctttcttcggaatccccatcgcttcggcgatggcggccggcttttgctcgtagaagtagcggcgcgcaaggatttcgcgggaaggttcggggagatcggcaagcgcttcgtagagttcctggtagtcaatcggctcttcgggcggctgagcgaaggtttgcgcaagtgcgtcatcgaagcttgcggcaacggtgcctgatcgtttgcggaacaggtcgatggcgaggtttttcgttatcgtgcacaggtaggttttcaggctggccttttccggatcgaagcgctcggggtgttgccagaagcggaagaacgcctcgctcacgcactcttcgacgtcttcggtcgaaaacccagcggattttgccagatggcgccccgcgaccgcccagagcaaccgggagtattcgccgatgatctcttcgtatgcgcgttggtcgcggcgtcgcagccgctcgatgagctcttgcgagttcaatcgccctccttcggtatgctgctttgcgcgccgcattcggtcgcgctgcctgcttttcgtaagcttacatacccgtattcgcagcgatggggtgaaaacactcgccgtttcgaggattcgacagaaaatgtgcaaaggggccaaggaaagagcaggtgcgggagacggagtgcggttcgtggcggtcccgagtcgctgacgctgccagttcgatgcggctcacgcatcgaaaagcatacggtggagctcccttcttttttcgagggtttcctcatcggcttcgggaagttcgacgccgagatggctggcgaccgttcgagcgatctcgtcgagggcctcgaggctctcgaggtcttcttgtgtgacggaaagcacggtggcatccggatgggctgcagcatcgaagggattgcggttcgggtcgtcgacgatatcgattgcgatgttgccttcgggccaatagaggctcatgggtttccctttcgtcgttttttctgttgacgagaagcatagcagcaccgttatagccaaacgaactgatattttgcccagaaacccagcacggaacgaaggcgcgcacgacttcgctccaaccgattttctgctcatggggatacggatctgacgccgattgcctgcaaaccttatacggattgcgctgaagcgcgggcgaggtcggtcgaggaagagggcgtggccgaacgcggcagtttcatcgtgaaccccgagggaaaaatcgtgtgttacgaggtgaacgcaggcaacatcggccgcaacgccgcggagcttctgcgtcgcgtacaggcgagccagttcgtcgccgcacacggcgacgcggtgtgcccggctcgctggatgccgggtgctgaagtactccatccgggtatcgatctggttggcaagctgtaggcgcgcatccaatcggataagcggtaaatcgcggccccggggaacccggggccgcggtacaatggctgcgagagaataggatacgcgcatgtacgatggaataacgcagcccggtcgcaacgacgagtgctggtgcggcagcggcaggaaatacaagaagtgccatctcggcttcgacgagcggcttcaaggactttacgatcaagggttcgaggttcccttccgcagcctgatcaagacgcccgaggatatcgagggaatcaagcgaagcgcgaaggtgaacatcggtgtgctcgactacgtggcagaacgcatcgggccgggcgtgacgacgggcgaaatcgaccgctgggtgcacgactacacggtcgaacacggggcgataccggccccgcttgattacgagggctacccgaaaagcgtctgcacatcgatcaacgaggtcgtctgccacggcattccatccgacgacgaggtgcttgtcgagggcgatatcgtcaacatcgactgttcgaccatcttggacggctacttctccgattcgtcgcgcatgttctgcatcggcgaggtcgatgcagagaaaaagcggctcgtcgatgtaacgaaggaagcagtcgacaaggcgcttgctcaggtgaggccctggggcttgcttggcgatgtggggcatgtcgtgaacgagttcgcgaaagagaacggctacacggtcgtgcgcgagttcggcgggcacggcatcggcctcgagttccatgaggatccgttcgtgagcttcgtggccgagggtaactcgggtatggtgcttgttcccggactcgtgttcaccatcgagccgatgatcaacatgggtgcgcaggaaatcgatatgagcgatccgaacggatggaccgtgcgcacgctcgaccgccagccgaccgcccagtgggaggtccagatcgtcgtaaccgaggacggctacgagcttttgtcctggtagggcgatcgatcgcggttgatcggcgctggccgcggataaagctcactctatcttgtcgagcagatcgatgagctcgtcgcgcgaatggactcctgctttctggtagatgtggctgacatgggtcttcacggtgttgtacgaaaggaacgtttcgttggcgatcgattgcagcgttcgtcctttcagcaggtattcgagcacatcctgctcgcgtgcggaaagcccgtacatcctcgcgacaacgccacatcgtccttctatgtcgtgcaaagggttgccgcccgacgctccgcttccgcctactccgcttcgcagttttaaaacggccgccttgtcgcgctcgcggttctccacgctttcgaacaccttcgggaaaagcaaaatgccaacgagcagcaataggtagacgacgccgaatgtgatgcctatggcccatgtgctcgaaaaatgctggatggctgaaacgagtgcggttccggcgatgagcccgatgtcgatggcgcttgttccccatgcaaacacgcgatgcgccggcacccgtgcttccgatgcaagcaacccgaattcggtataggcgtaaaccaaaaacaagtggtatcccgtaagggtcagcacgcccgcccaagattcgaaaccggagagggaggtgcttttgccggacgcaagcgaggggatgatgagcagtcctcccgcaataaggggtatgaccagtcgggagaatacgaaggtgctgcgtttttccatgaagtagtagtcaaggcaaatcgcaatcactatcagcatgcagacacaagagaggatggtgttccatcccgacgggtttcctcctgcctctgtgtaagtgtgccagttttgaaacagtcccgtagggagggctaggataaagcagcagatgaaaaggatcgcaacgttgcgctttccctgttggaatatcgttttgaaaaatggcgaacccgcttcggcgcggcggttttccttgtgcgcggcggttggttcaggtgcggatcgaagggaggtcgcgtcgcttttcgagtcgaggctttcgacgtgtttcacgcaaagcgatgtcacggcgggcagcaacagcgtcgtgccgatggcggcgagatcgggaaggttggggataagcaacgcgatgagcatgcccgccactatcgagccgcccaggatgagccgttgctcgctgacttgattcaatcgggcgtagggctcgcaccatagcatcagcatgcccgccgttccgattcccgatacggctgatccggcaaacaccagtgctgtgaaatctccattcgcgtagccgatggaaagaagcgcggttcccccgatgacgatcgcggggaataaggttgtcgctgttcgaccgtgaaagccgatcggggtcttcgcgctgagggcggcgaaagccagcaggcttacgcaatgcgccactacgttcacgagccatgaagcgtggctgaggtcggcggatcccgtttgccatagggatgctgtgaccatggacacgcttgcccaggcccagtaggagccgatgccgataaggaggccaatccctttttcgaaccctaaaccttttgccatgaagtttgcccatgcccatccgtgatcgatcccagcgattccctcatacgccattatctcagaatctttctcaagtacccgcatcgccgtgtccggcaacctcacccgtatcaggtgattatcaagtgcacccgattcttccgatgactttcttctccgatcgccccattgtaaaagccgacttgccggccaagcgatttgcgcggtatggcgaggtgcagcaacggatagcgattgagaggggtcactatggaaaagaatttgtcgcgaaggggttttctcggattgacggcagcgggcgtcgcccttgcgggagcggggcttgccggatgcagtcctgccaatacggggggcaacgctgcggcgaaggaggacggtggggattcgccttcttacgaaccgggcgagatcgtcgagaccatcgatgccgatatcgtcgtcgtgggccttggcatgtcggggcttgctgcggcggtgcaggccgccaacaacggagatgcggtcgttgggatcgaggcgacgaacacgacgggcggaaacggcatcggcgtagagggcatcttcgctgtgggcacgaagctgcagaaagatgccggcatcgaagtcactccggttgagatcatccaaacggagatggaagaagcccagatggcaacaaacggcgctttgtggaaccggtttataaacgcatcgggcgacaacgtggaatggctgatcgagcaaggcgtgcagttctctggaatggtcgacgactacttggggtcgggcgtcgtgagctgctttcattggttcgagggcgatgttgcaagcgttggctatgtccctcagatgacggcccgagccaaagagctcggcgtcgacatgcgcttggagacttctgcgaagcagcttatcatgtccgacgggaaggtcgccggtctttacgctgaggattcgggtggcaatacgctgcagatcaacgcgaaagccgtcattctcgcaaccggcggttacgcgcagaatcaggagctcatggaggagcgcggatggaattgggacaacatcatctacggtggaacgcccggacataacggcgatgggctgaagatggcgttcgacgtaggcgcacgtagctttgtgagcagctcaacattcaactgcacgaacatttgcggtcgcggcgacaccttcgcatggaaggccgatacgttcacctcggtgttctgcggtgcggggatgttcggaacgggtggcgcccagctgtgggtgaacgaagacggcgagcgctttatctgcgaggatttcgcgaaagacaacttcgagatgcagagcgtgcctgccatgacgcaccgtgccatgtactcggtgttcgaccgcgccattctcgaggcgggtttggccggggatcccgatatgctggaattcgtagacaccgatcccgaagacgatctgtgcaaagccgacagcatcgccgagcttgccgaatgcttcggcatggatgccgccgcactgcaggcgagcgtggatcggtacaacgaactgtgcgagcagggtgccgatgctgattttgggaagcccgccgaatccatggtccccatttccacgcccccgttttacatggcgaagctgaaccagtactacctgatgtcggtcggcggcatcgagtgcaatatagacgcgcaggtggtcaaccagaccaaggagcccatcgccggcctgtacgccgtcggcacggacggctgcatgctgtatcgcaacatctacaccatcaacgtgggcggtacgtgcaacggcaacaacgtgaactccggtcgcacggcggccaatcacgcgcacggctatatcgccggctaatgcttcgccgattcgcatggcgtaccggcgctcgcgacctgctttgacaaaagccgcgggtggcaccgatcatggggctccgagcccacgcgattgccatcccggctactatgcggcgttcgtgtgcgatctcgagggcaacaacatcgaagccgtcattcgcgactacgcggagtagccgaacccgttatcctggcgcccgtcgtttttcggcgggcgctttccttctcgaacgatcttcaatttcccccggaaagcgaccaatatgccaactttagggcgctatcgccattttcgcgagcaggatgcggttttgcgattatacgcccatgtcgaagcaagcgcatcaggctgaaaacagcttgcgtatttcatcgacgagctgctttcgcgtgaacacgagcaacccgagaagaaacacgctcgcggtcagggcgctgatgttggcgagtacgttccacgttgtgaggccgagcgcaacgagcgcgagcggagccagcccgagcagcacgtcgaaaagcaggtattttgcgtatcccgagacgaacgtccctcggaatacggcgaggagaaccgtatcgaacacgagggcaaccaagcatatgccagggatgacgaacgtcgttacggcgaggttgcgcgttacgaggaaccatacggcggcgatggcgagcagaacgaggaagtagcggacgaccatgcgcagaaagtcggtcgtatgcatgagtatgtttcgtacgaacagatagtttgccagaagcgctatgcaaacggagagcacgatatctcccggcagcgaaaacaggttgccgaaaaacaccatgagcaaaaggcaggcgccggtggcgaatgccagaaccttgagcgcgatgacccccgactgcttgatctcgttgcgcgggtataccgagggctcggcttttcccgtaagctccgtctggcacagggggcatacgtcgaggtcgccgctaaaatcaacagcgcatttatcgcatcgcttcacagacggcccccgttcttccttcgtccggaaaccttaggttcctggctgcgcttcatcgcgcgggcgccgtcggccttgttccgcctcgttcttcgcgcaccgccctctttgccgctctttttcccatgcgatgcctcggcgtcttcgcttaaaggcgccgtttgggagccgtcttcgacatcgttgcgagcgggggcttggccgccgagacgtttgaccgatgtttcgaacttgacttcgagccgatcctcggcaacctcctcgctcgttttgttgatgttgacgcggcccggtattccttggtccgagaagtaccggatgaagttcttgacgacatcgaggttcgaatagaccgtggaaatgccgatgctcagatcgtcgccgaaggagcagagcgtgaaattaagcccgacggtggacgtgagtatgttgacgtcgcggatgtagggggcaagcctttcgtcgatgcggatttggccgagattggaaacggtcgtcgtggtatcccgtgcagccaggcggtttgcgatggcgaggatgatgtccttcacgaacagcggggccaggcgcaaaagcgggtttttctccagcgctatcatgcggttcatgcgagacttaagctgctcggcttgagtggcttctttgagctgggcgtgtatggcttgggcgatgctttcgaccgattcgtcgttttcgccgggaacataggaaacgaaggcgagcccgaagaagttcttgactgtcgtcgattcgaagaactgacgcaggtcgacggggatgtcgatgcgaatggcccggctacgatcgcggcgcggcatctccatgcggatggagcgcatgatcacggcgatgagcagcgaggtcatgctcacgccgtacgagcgggcaagctcgagcatcttggctgccgaggcgtggtactccatgtacgtcggatccgcttcgtcgcgccagcctgtgaggcggtacactttgggcgcatgggttgcggcggccttattgcgctcgtagtacttatcgaagctattctccgacttctggctgtccgaaccgtcgtattcgagggcaacgccctgtatgccgtatcgttcctgcacgtacgcatagataagcgccttgaagaagttcagggagccgcgcccgtcggataccatgtgggacacctcgaagttgatgcgttcccgatagtagctgacgcggaacagcacgctttttgcgttgacatgcaggccgaagcagatcggcagattctcggggcctgcggagggaggctcgcttgcctgttccagatagtgccagaacatgccgctgcgcaagcatacgttgaaattcgggaataccgcgaccgtcttttcgagagcgcgctgcagcgcttcggggtcgatgtcatctgcaatcgtcgccgaatagcggaataccgtctggttcgaactgcccgcctgcgacgagtagaactttccgacgttgtctaatcggtaccaagtattccgagccaagcctgttcatctccctcggcgagctcttcgccatccaagaaatgcttgattatacgatacgtgtccttgacgaatctgaacacggaagggtacagcagatacccgtgaaccgcatcgagtacacggtagcacgcaacgtcgctgccttccagatccaaccgtcctgcgaacgcttctccctcatcgcgcagcggacagtattcggccgtgatcacgagcgtgcggggctgcgcggagagatcgggctcaagaagcggcgcgaagtaggggttgtgcaaatcgtcgggagaagatcggtagagctccatgtatccgactatatcctgagaagtgagcaggtagtcctcgccgttttcccgtacggaatcgaaccacgacgtcgcggggttgtggtcgttgtaggttgcggggtagagcagcatctgcgtgcgcggcatgaattcgccgcgatcgcgcgccatgagcgataccgcagcggcgaggtttccgcccgcgctgtcgccgaacagcacgatgttgtgagcatcggcatcggcaagcaacgtgcccgcgtggagctgcctggctacttcgtagcaatcttcgggcgcttggggaaaccgatgctcgggagcgcggcggtagtcgaccgataccacgcgccgttcgagtttgagcgccatggtcgtgcaggcgtcgatatagaaatcgacgcttccgttgacccagcctccgccatggaagaacaggatcgtgccgcgcgagtcttcggttaccttgagtcccgagccgagcgagaaatcgatgtcgagcggagtgaatacgcgcagcggaacctcaaagccgtccgccatggtggcggttgcctcgtcgatgcggcaacggggatcgggcagggtgagcttgccgatgacatcttcggccacacgctgcgcttcgtaggatttcctgatatcgggcttgatccgcgaggcagccttgaaagcggcgagaaccgccttgttgatgggcatggtcgtgccgtcctttcgagaaggcggaagaggtatcgatcctcgggatccaacgtaccgcgccgcgcaggcatctgcgccgtctttcgattgtatcgtagcacagggaaccgctcgagcggatgacggtgcccttacgataacttcacgtcggccgctcgtgctgccgcccgtgcggccgggcgagtgggcggcacgccgcctcggacggtcggctttgggcggtgctactcgccgtgcgcggggcaggtgacctccatggtggcgaatgcggctgccacgcgctcgtatcggtcggcgtcgtagccgattcggtcgatctcggcgatatcggcccggtccttctcccgttcggttgcgactttcgaggcgcgcacggcctctatcgtggacatgccgacgatcgagtggtcgggcagttcgcgcatctcgacgaaatcggcctcgtcaagcccttcgatcgtggccaggaacagcgcatcgtatccggcgaacgaggcgtggaccgcgtttctctgagcgagctttccgccctcgattcgaaacggcgcgaagctgaccatgacgccgtcgatgatcgcgtggacgccgaagtcggttttttcggagttgcagtccagctcgagggaatcgagtgcggcatcgtagagcccttgctccttcagccatgcgcgcaccgcaggcatgtcgtgggcatgggctgagaagtcgacgtcgtcgtggcagcgtcccgaatcgttgcccgagacgatccacggggctattcctccttcgagaaacgctttcccggagagctcgggtgcgtgcagcaccttgagggcaaccgccttcgcatcggcaaaactcgttgtttccatacgctctcccgtctttgcggattgttgcgcgcccgaagctgggatgcgattgggcggcgcatcaacctggctttatcgcttgcgcgcagattttgcacgtaagcgtttcacccctgttcgtctgttggggtggatagtcgcatgagatagtcggccttcttcgccacctcgtctgcggtgagatccggctcttcgaacagccaaagccgaatgatgccgaccagccccgagaccacgtagtgaaacaaaaacgtcacgtcctgtttggacatatgcgggttcgcgcgctcccaatcgtcgtggtaggcatggtagagataggcgattacccgatcgatgaaattgccgtcccctcggttttcgaacgcgcttcggatgatcacgcgatgatccgaagcgaacgagacaagcgccggcgccatgtcgaacacgttggggggaagctgttcgacgtagcgttcgaacccggcgaacagatcgtcttgcatggcgaggagaagtgcgaactgatcggagtagtacttgtagaacgtttttcgcgagatgcccgcctgatcgcagatctcgcttacggtgatctccgaaacgggcttgatctcgagggcttggagaaacgaatcgaagaggcattgcttggtgtagcgccgtcgcgagtctttcggttcgatgtacatcggatctccttgccgtaccgattgcagcgatcgggtcgtcaagccgctcgatcgccttccattataagcgcatatgcggattcgagaagcgtggcgttttcaaaaaaaatcggtttgcgatcgggttcttccatcgctttcgggtctatcgtttcgttttatgcgggcgcccgattccgcgaagcagccgcgtctgggaaacgaggaggcgcgcttcgccgtgtgcagcccaaagcaggtatctgagcatccgctcccgctcgacgattttgagggtggtcgccgctgggagcctgcctgcttcgagccgcctgccgtattcggctatcgagtaagcgtttatgcggaacttggcacccatgagcgtggttgcggcgcatccgaactctacgataggcgctgtttcgaccttgctcttcctttcgatccgctttgcctcccggctgttgaatggcctgatggcgatgtggttcaccccgcttgagaacgcgatgtcgacgctgcattgcagctgttgggatgtctggccgggctgcgcgaacgcgaaggcgagcgatacggtttcgaaagcagcttctttgagcgcggcgagcggaacgaggttttctacagcgggctttgcgacagaccccgtgttgcgaggaggggggtctgccgcaatggaaaggtgcgcgattcccgcttcgcgcagcatgcggagcctctcgaccgtgacatccgccgcggcgagttcgaaccctacgccatgcgtaacggcgaaccgcctgcggaccgcctgcatgatcgaggtgatcgcccgttcgtcgagaagggaggtgtttcctttgatgaacagcgtggtgattgttttgcgatcgcgtttggcggatgcgccgatggcggttctccaaggagcagcgcctgccgcatcgacggcgccgacgaccgcgtggacgacggccgcgttgccggttgccgcgccaggctgcggctgcgcgaggatgccgtgctcttcgtatgcatctgctgcggggacatggatgtacattcccaggttggatgcttctgcgtagtcgaagtacgaacctcgctcgcttgagaagcgaagaggccggatcgagctgagtttcgtcgaacgcgccaggcatgctttggcaagcgaggatacggtacccatggtgcctcccatgatcggtctgttcctgatgtctacattgtagacaaatgttacctaagatacaataggctataaaaataaatatatgatgatacggaaaaacgattggcgatcggctctgcatcgggccgcgctgcgctgtgacggggtatacttactgttcgcacgctggcttcggatcggcgtggtcgtaggtgcgcgcgacgcggaaaaggatcagggcgatgcgggcatgggggcgacttgccgcgtgcgcggtgcggatcgacgggccgatgagccgggaaggcagggtggttatggacagtacggatgacgggattgcgaagcgcgttgcgctcggcatgagcgggggggttgacagcgccgtttcggccgctgtgctcatgcgcgcaggatacgaggtcgtcggagtcacctgcctgttcaccgatgacgataaatctcgcgatgcggcggccgatgccgcagacgtttgccgcatcctcggcatcgagcatacggtttgggaatgctcggcggcgttcgagcgcgaggtcatcggttcgttcgtagacgattacgcacacgggctcacgccgagtccatgcgtttcatgcaatgcccggtgcaagatcccgcagttgctggctgcggccgacgggcttggatgcgcgaaagcggccacggggcattacgcgcgcatcgcacgccttgatgaaaccggccgtttcgttgtcaaaaccgcgctcgacgccgctaaagatcaaagctacatgctttcgcagttgacgcaggagcagctttcgcgtctcgtgcttcctttgggtggcgcgacgaaggcggatgttcgtcttctcgcatccgatcttgcgctgcctgtcgccgataagcccgaaagccaggatatttgctttatcgagggcgatcacctgacgtttctcgaagagcgcggcgtcaacgacgagccgggcaagatcgtcgatgcgacggggaacgtccttggccgtcatgccggtttgttccgctacaccatcggtcagcgcaaggggataggcatcgcggcgcccgagccgtattacgtgatagggaagcgcttcaagcaaaacgagcttgtcgtgggtttcaaagacgaggcgctcatcggctatgcgaaggttgcaagccccaactggcaggcgttcgaggtgctggccgagccgctcgagtgcatggtgaagctccgctaccggagcacacgggttgcctgcacggtggggccttgcgacgacggatcggtcgacgtgcgccttgtcagcccgcagccgacaacggcgccggggcagcatgcggtcttctacatgggagaaaccgtgctcggaggcggcatgatcgaagaggtgtaactttttgcagtcgcatgtcgccgatgcggattctcgaggcggatgaaatccgcctgcgctgcggcgtcgccgacgaaacggttcggcgacgccgtggaacgcctttatctgttcggggctgctgtgctatgatgcgcgatatgatgcaggtcggaatacaaggaggtcgcaaggcatgaaaaaggttttcatcatcggcggtatgggagccggaaagtcgatggcgacccaagcgctcgcggagcaaggattgccttccatcgatctcgatgaagtcggccatgaggttctgacgcgcgattacgtaaaagccgatctggtcgaggcgttcggcggcggcattctcgatgaaacgggagaggttaaccgcccggctcttgcggctaaggccttcgtggacgaggtgcatacgagcctgcttaacagcatcacgatgccgcgcatcgaagagacgttcgccgatcgcgttgacgagctcgaaaagagcggaagcgaagcggtggtcatcgagtactcggcattcagaaacaaggatgtctctttggccgcgaaagcggattgcatcattgcggtgctcgctccgctcgacgtgcgcattgcgcgtgcggtggctgcgggttgggatgaggacgacgtgaggcgccgcatcgcccggcagatcaccgacgccgagcgcatcgacgccgccgatgtggttttccataacgattcgacccccgatgagctgaagcgccaggtggtcgaatggtggaacggcttcaagggcgaaaactaacggttcggtacatttttcacgaacatctgttcactactcgtagcttgtgctacgcttatcctcttatgcatttattcgtccgaagcgcgcggctgacatgagaaaggagaagcgatggctcatctttcgaatatagagggaatggaaatggcgggcaagccccaggaggttcgcctcgcgtcaaccccgtttcgggcggtttcgcccttcgagcccgcaggcgatcagccgcaggcgatcgagcggcttgcgagcaacgtcgaaagcggcatgcgctaccagacgcttctgggcgtgacggggtcgggcaagaccttcacgatggcgaaggtcatcgagaaaacgcagaagcccacgctcgtcatggcgccgaacaagacgcttgcggcgcagcttgcatccgaattgaaggagttcttccccgataactcggtcgtctacttcgtcagctactacgattactaccagcccgaggcgtacgtgccctcgagcgatacgttcatcgaaaaagacgcctccatcaacgaagaggttgagaagctgcgccacgccgcaacctcggcgctgctttcgcggcgcgattgcatcgtcgtcgcttcggtttcgtgcatttacggcatcggctctccgatggattacgcggggatggcggtattcgtcgataaagataaggagatggatcgcgatacggtcatccatgatctcatcgacatccagtacgaccgcaacgactacgagctcaagcgcggaacctttcgcgtgcgcggtgacaacctcgacgtgttccccccgtatgccgataaccccatccgcatcgagttttggggtgatgagatcgaacgcatcgccgaagtcgataacgtgaccggcgaagtgctgaacgatttcgaggctctgccgctgtggcccgcctcgcactacgtgacggcgcggccgaaaatggacaaggctctgaaaaccatcggcgaagagctgcgcgatcgcttgcagcagttcaaggaagagggcaaactgctcgaagcccagcgtctcgaaatgcgcgtcaactacgatctcgagatgctcgaaacgatggggttctgctcgggcatcgagaattattcgcgccatatggacggccgcgaaccgggtgagcctccctatacgctcatcgattactttccgaaggatttcctctgcatcatcgatgaaagccatgtaacggtaccgcagatccgaggcatgcacgagggtgaccgcagccgcaagatcacgcttgccgagcacggttttcgtctgcccagctgtctggacaaccgcccgctgcgcttcgacgagttcgaggaccgcgtcccgcagttcatctacgtatcggcgactcccggcgattacgaggagaaggtatcgcaggacaaggtcgagcagatcattcggccgacggggcttctcgatcccgagatcatcgtgcgcacctcggcttcgcagatcgacgacatcatcgacgaggcgaaggagcgcgctgctcgcaacgagcgcgtgctcatcaccacgctcacgaagaagatggccgaagacctgaccgaccatctgcttgatcagggtgtgaaggcgcgctacatgcattccgacattgctacgctcgaacgcgtcgatatcctgcgcgatctgcgccgcggcgaattcgacgtgcttgtgggcatcaacctgctgcgcgagggcctcgatttgcccgaggtttcgctcgtggcgatcctcgatgccgataaggaaggattcttgcgcaaccatcgctcgctcatccagacgatcggtcgcgcggcccgcaacgtttcggggcaggtgatcatgtatgccgacaagatcaccgattcgatgcggctcgccattgacgagacccgccgccgtcgtgaaatccagatgcagtacaacgaggatcacggcatcgaaccgcagaccatccgcaaggccatcaacgatatcatgagctacgtgaaggacgaggtgggcaatactacggccgagcaagtgaaccttgagctcgcagctctttcgcgcgaagaggtgctgcgcatcatctcttcgatggaagacgacatggcgtcggcgtccaagaacatggatttcgaagaagcggctcgtctgcgcgaccaggtggtcaaactgcgcgcccaggtcgagggggcgactgaggacgatgtgctcaagcggctcaagaaggacgcccgcaagggcagtgcgttcggcaatcgcaagcatgccgcctatggctcgagccaacgggcgtagggccgcagatcggcgcagcgggccgaccggttgaacaggcgaaacgagaacccggcagccgcttggtgtgggctgccgggtagttggcgccaagcgtgctcgccagtaagacgcgcacgctggaggctaggcggtctcggaaagcgaggctgctttttcgcggttcgatctgcttgcttgggcgcgcattgcacgggcatcgtcgaaagcgacccgcttcggcagctccgcgaattcggaaaggagataccgcacgagatcggagcggcttaccgtgccagcgagcttcccgtcggcaacgacgggtagcttcttaatgcgcgggtccgaaagtgcaaggcagacgttttccaccgaggcgtcctcctcgatgcagatgacctttttcgttgcgagctccatgacgtttgtcgaaaggagcttcggcacgcgctgggcaagctcgccccgttcggcgatcgacatgtaggcgtagagcgggtccatcgccttgcgttcgcctccagcgaggtagcgcatgatgtctccatcggtgatgaaaccgacgacttcgttgcgggggtcgacgacggggatgccgcctgtttgggttttcaccagggtgtcgacggcttcgagcacggtggtcgagctgctcacccggtaggcatcggctttcccgataagcgagaggatagatgcgttttggacgggggcgggagcggtttggtttcctccggaggattcaagtgcgcctttgcgcgcgtagtacaccgagaccaagaatcctatcaccgcgcaaacggccgccgcgaacaccgcgctcgagaatcctgctgcttgagcgagggctggcgccgttcccgcttgggtttcggcaccgacgcgcgtcgagaagatgccgacgaacagggcgggcccgacgcaagctgcgatctggatgaacaggttcatgatcgttacgccgttgccgttctggctgcgatcgagactggcgagcccagccgtttgggaaggggagaagatgagccccacgcccgcgtatacaagcaccgaaccggcgagcacgggcacgagcgccgcctccatcgagacgaatgcgattccgatttgcccgatggcgattatgccgaacccgatgggcaagagcggccatgcgccgatcctgtccatgatgcgtcctccgaagatggcggtagcggagttgacgagcacgggtacgaggatgagcagcccggccacaagcgccgaagcctcgagcgatccctggtagtaaagcggcagcagcacgctcatggagaacgtggtcatcatggccacgatcacaagcgggcatgcgagggcgaatcggggatttgcgaggggagagaggtcgatcagcggatcgtcgagctttttctgccgcagcgcgaacgccgcaataatcgccacgccgacgatgaggccggcaaagccgacgacgatatcggatgtgaacgacgagagcccgtagacgaaggcggtcaaaccgatggcggcaagggcaaccgagggcgcatcgagggcggcccgtttggtttcgaggatgttcttcacggcgaagatgccgacgattgcgatgacggcgatggcaacggtgggcagcagaaagaccgatcgccagcccaaatacgttaccatcaggcccgaaacgacgggcgcgaaggcggggccgagcgtgatgcagcagcttccgatggaaaggtaggtgccgagccgctgcttgggcgccactgcgagcaccgaagtcatcatcaggggaatgaagatgccggttcctacggcctggagcagacggaatgcgagaagcagggggaaagtgggagcagcaaggcacgccgccgagccggctacgaggaacgctgacccgatgaagaacagcgtgcgaagcgtgaagcgtcgggatagatacgccatgcaggcgacgacgacggccgtcactatcatgtagccggtaacgagccactgcgcgagccccggatcaaccgagaacgcggcgatggtatcgacgagtgctacgttgacgatgttttcgttgaaggcggcgacgaatgctgcgccgtagagcactgccagcataggcagctggtttttcttattcaattgagcatgatcctttctgtggctcgacggaattcgagagtaacgcctctcgcatcgagcttgagcgagcgcttattctagcggagagcccatgcccttcgtaagcgttattttgtggagatttgaacaggggttgtgggattctggcaaagcgggccgtcgcgggttggctcgttgcgggtcgcgcatttcgtggagcatcgccgttctgttgtgttccccgaagtcgagaacctggcacaaaattggacctgtggcaattttccaatttattactttattgtttttggaataattatcactaaaatgcctggtggtgaaaaatgtgaattgcctatttcgcattattagtatattacattttgccacaggtccaattttgtgcccagtttgaggatatttggaacgcagagtcgcgttccgaggcaccgcagccctccatgctgttttcggcgagctttgatgcggcgtcgccaaaacagagccgtcgtgggctcgagcgcagggcgatcgcatcacccgataaggttgcaggtgcaatgcgcagcaaaagcaacgcccatgctcgaaagcgatgggcgttgccggttggaaggtgccttggcgtgtttgccgaggttgttctgtcggggaaagccgctaacgttgctcaacgggaagcgctgcgggctgttcggccgcctcggcggcctgttccgaagcctgtaggttcgaagtctccgttggcgggttgttcgaagtgccgagtccgcccgctgcagtcgtcctatcgagggcgcgcacgcttttcggcagatagatcaagagcccaagcgccaagcacaggatgccgtcgaccaagaaaaacggtgcgatgccgatggcttcggccgtcacgccgccgatggcgacgccaatgggcgaggcgagtccgatggccgccgtggtgaacccgagcgcgcgcccgtttttctcgggtggcacgtttttttggacgagcgtgatgagcggaccgttgaaccagccgcatccgacggccatcacggcgcatagcgccacgaagacccagtacatgttcggtgaaagcaggccgcaggccgccgttgccgcacctacgatgatggcggcgaccgccatgagccccgcgagccgcttgcctccgccccaaaccatgaggatgatcgatccgaccaccatgccgatgccgaaagccgcttcgacgatggaggccgcatagccgtcgcctccgaagtggctgtacgtcatgagcgggaatacggcgccgaggggcgcgaaggccatcatgccgattgtgatgcccacgatgaggatcatcaggccgcggtttgccgaaagcgccatccagccatctttcatattggccaatacgtgttggttgtcggtcgtttcgtcgtggatggtcgggatcttcgcaagcgcaaggccggctacggcaacgcatgctcccagaaaatcgaggaacatgaccgagtagaagccgattgcggtataaaggaagatgccgaacgcaggtgcgccgatgctcgccagactcatgagcagctggtcgagcgtgttgatgcgcagcaggtgcttctcgggcacaagcaggggcattgcggccatcatggcgggaccgtggaaggcctgtccgatgctgcgcacgatgatcatgacaatgatgagcgcaaacgatgccttgcccagcaggatgaagatgccgaggatgagagagacgacgccgacgctcatatcggcgactatcatgacgattttccggttgtacttatcggctatgactcctccgaagggggatagcagcccctggggcaggtaggcgcaaatggttgccgcagcaagcatgagcgcgctgccggtggtttcggtgatgtaccacacggcggcgtatccggccgcgtagctcgttatcatcgacacggcctggccggcccatatggtcgcgatgatcacgagccagcgtttcgggagcggttgtcccgcagcgctgagtatggttgtcgattccgtcatatgatgaaactccttgttcttgatggtgtcgggcggtatgcttcccggcggtttccggtagcacgtttcaattgagtgtggggttgcggaagcttgtttgccagctattccggttggaattttgcgcaactatcgggtgcggatacgaagcaactgcgctgatcgggcggcggtcgaccgagatatgcactgaaagcgcgtaagccggtgaggcgagcggggagcagacggtgcgataagcgtggaacggcacaggcgattcgcatccgcacgacgaagcgtgtgcgattgcgcagacaagtctcatgaaacccagggggttaacgaaacatgtgatgaatccctgccataatctcctcgatccgcttggttttggcgtcgaccagttggtcgctgcagccgaaatgtgaaatgagtatcgagtttaccatgacaaagcccgaacgaaaccgagaatcgccaagaaatgctcggtaaaagaatggaaagtaagctttacattttctagaaagcgacgtatactgaatggaaagtaaactttacattatcgcaaaggatgcgagcgcggtgttcggaaggggttctgatgaacgaaggaaaatccagcggagggcaggtgcggaaggccaataagaggacaggggccgttaccctttcgatcggtgttgcctgcctcctcatcgcgcttgcgcttggcttcaacgtggggggattggccgatgccgttccaacggtagccaaagccgtttggggttttgccgggtgcgcagcggcgcttctggtatgcggaatagcggcgttgctgcataagccgacgccgcaggagcttgtcagtcagggcgacgagcgcaacaagaccatcggcgcgctcgcttcgacaagggccttcgagcttttttcgatcctcatcccaatcgtcgctttggggttgtactcgtttgatcaggttacgcttgtcggcatgctcgtgttgataggcgtcgaagttgtcgcattcgtcgcatatttgatatggatagcaaggatacagcggagcatgtagcgccgggtctggaattgcgtgccggcatgccagcgcgtcgcctcgatgccacgaggcgacgcgctggttcgttctatctatcgaaaccgccttggctggaatgatcgagctctcggtcgtgctctttaggcgagctcgagctcgcgctcgtgttccgactcgtgctcatggatatcggttttgggtttctcgagtccttcgatcacgatgcctttgcgctcggcgtaatcccagagcgccgcatgtatcgcctcttcggcgagaagcgagcagtgcactttgacgggtggcaggccgtcgagcgcttccatgacggccttgttcgtaacctcgagcgcttcctggatcgtcttgccctttacgagttcggtggccatcgaagaggtggcgatggcggctccgcagccgaaagttttgaacttgacgtctctgatgcggctatcctcgtcgatatcgagatagacgcgcatgatatcgccgcattgggcgttgccgacggtgccgcagccgctgcaattctctatttctccgacgttgcgggggttggtgaagtggtccattaccttttcgctgtatgcaaaagccatgagaggctcctttcttggtggtcgtcttgtgccgttctaactcgcctgcttatgcgctttgaggaagtcttcgtataacggactcatggcgcggaggttgtcgatcgttcccttgagggagtcgatggcgaaatcgatgtcgtctcgcgtcgtctcgcgtccgagcgtcaggcgcagcgacccgtgggcgatctcatggggcagcccgatcgccagaagcacgtggctcggatcgagcgaacccgaggtgcatgccgatccgcttgaggcgctgatgcctttgaacgccagttggagcagcattccctccccttcgatgaattcgaacgagaagttcacgttgttgggcagccgttcggtccgatgaccgttcaggcggctgtacggaatctcgcgctcgatgcgtccgatggcgtaatcgcgcagtttggcaaggcgggcggcttcctcctcctgctcggcgagcgcaagctcggttgcgcgcgcgaagccgacgatgccggcgacgttttccgtgccggcgcgaagcccccgttcctgctgtccgccgtggatgaacgccttggtcttgacgcctttcctgatgtagagcaaccccgtgcccttcggtccgtataccttatgggccgaggcagagagcagatcgatgcccatctccttgacgtcgatcggaatgtgtccaaacgcctgcacggcatcggtatggaaaagcgcgccgtggtcgtgggcgaccttcgcgagttcggcgatgggctcgatggttccgatctcgttgttggcaaacatgatcgacacgagaatcgtatcggggcgcatggctgcctcgagatcggcgggggagaccctgccgtcttcatcgacgggaagataggttatttcaaatccgcgtttttcaaggtattcggcagtatggaggatcgcgtggtgctcgatcgcgctcgtgacgatatggcgtcccttcgattcgtaggcttcggccgtggcgatgagcgcccagttatccgattcgctgccgccggaagtgaagagcacttcgcggtcctgcgcgttgatggcttgcgcgacggtgcggcgcgcttcggcaagcgcggatgcggcttcttcgcctaaggggtagatggagcttgcgtttccgtacgcttcggagaggtggggcatcatcgcttcgagtgcttcggggcgcatgcgcgttgtagctgcgttatcgaggtagatctgtttcattgcggtgctccttgtgctattcggggttgaacatggaaaggtatcgttcccccgtatcgggaagtacgactacgatggttttgttttcaaattcggagcgccctgccagcttttgcgctgcggcaaccgccgcacccgatgagatgccggcaagtacgccgagcttcttcgcgagttcggcttggacctcgaacgcttcggcggtggggatgcgcacgatttcgtcgtacacggacgtatcgagcgtatcgggtacgaagccggccccgatcccctggattttgtgcgggcccgccgtgccgcctgaaagaacgggggattcgtcgggttccacggctgtgatcaggatgttcggattcttacttttgaggtaagcgcccgctcccgaaatggtgccgcccgttccgaccccggcaaccagcgcgtcgaccttttcttcggcatcgcgccagatttcgggtcccgtcgtttcgaagtgaatgcgcgggttggcgaggttttcgaactgccggggcatgaatgccttcggatcgtcggcaaggagctcttcggctttggcgatggctccggacatgcctttcgcgccctcggtcaatacgagatcggcgccgtaggccgccaaaagctttctgcgctcgatgctcatcgtctcgggcatgacgagcgtgaggctgtagccccgagccgctgccagcatggcaaggccgatgcccgtgttgccgcttgtcggttcgatgatgcggctgtcgggtccgataaggcccgaggcctcggcatcgtcgagcatggctttcgcaatgcggtcctttatgctgccgccggggttcgcggcttcgtatttcccgagtatccgcgcgcccgaaccgcttcccgctatgccggaaatgtcgagcaggggggtgttgccgatcagtttgtcgatgtttcgtgcgtacatggttgctgctcctcgtcgtatccgattctctcgtcaccaaatcctagtaatatactaggaataagatactccgatagaggaaaaagtcaagcggcgttgccgaatggtcgaaaaacatagtaaataagtatggaatatggatttggtcggcaaatcgcaccgtatgcgctctttgcgatcgatggggttcccaaggcggttacaatggcatcattctgcttgcgttggctccgttctcgttcatacacgagcgggggcaggtggccgctcggtatgcagctgcttgattcgggatcgaacaatggaggttcgcaatgatgatttcgaccaaagggcgctatgcccttcgcttgatgatcgacatcgccgaacagggtgaggatgcccgtgtgccgctgcgcgaagtggctgaacgtcagggcatttccatcaaatacctcgaacagctcgccggtagcctcgtgcgcgccggattgctgaaaagcacgaggggcgcccgcggggggtacgtccttacgcgaccttccgacgagatgacggcgggcgatgtgctgcgcgccgccgagggcagctgcgcgccggttgcttgccttgaagatgatttcggcgtttgcccgcgacggagcgaatgcaacacgatcgcgttttgggaaggtctcgataagacgatcgagaattacgtcgacggcgtgacgcttggcgatctggtgaagaagccggggtgcgtggcatagcgccttactgttttacgggcatctcttggtgtcttcgctgtgttcgggttgcaggatggcatcgagtatcttgtctcgattgagcaattcggaggaaatggctttttccattaatttttcgagtgtctcggtgaggctgacggcgcaaaacaagcggtgtttcgacagatgggatatttcgcggactataccgacttccgtgagttctttcatcgcgttgttggtcgccgaaaaacctcgtccgattttttctgatgcaattgcaatggtaagacagggccatccgagaaatagcttggcaagtgcaagcgttgcagagtcgtttcgcgttttgctgaggcttttttgccatcgttgccaatatgcagtgagaatgctttggcaaaggtaggcggtcttcacggctatttccgcgcagtatgagctgtgtcgaaaatccgtttgcatattcgcttcggcggttttgccgttggtgagcccttccatgtttgaaacgagcgattgcacgtggcgcgtgacgtttcgcgctgggccgatggcgagtgggacaacgctgctggtaagggctcctcgccgatagaaaaccagatgtgagaatacccgctcgtacgcatcgaggttcccttcataaggtttaatcaattgcagctgggcgtgtgagatttcggcttgcgccgagggggttaatacgctcgcgttcaaaaggtcgatatagtcgttgatgagctcatccttcgctggcgtctgtcgctcagcgttgatgccttctacctttttgcgggccgctcttcgctcgctgagatcgaggctcttcgggttcgcaatggcgtcgatttcgttttcattgtatagatcgcggattgtttcaaaaatattcgaatcgatgaccgtgtccttcgaggtgttgcgcgcaacccaatcgacggttcgcatgtagcggtaggaaacggtggcacccgatgcgtcttcgagtccgagcttatttgcgagacggtagagcctcgtgcaatcctcgtcggtgaatggggtgttgaggatggctgcctccagcttaaggaggtcgaggtatttcacgcgtcttccgtcgatgcttgcggatgagagggcttcgactcgcagcagttgctgcctggtttcgttcatgagctggctttgagatgcgagggcatcgaaccttaccaagtccatttccgaagaggagagaaggcctgcggtgtagccatcgatgcagatcgattcgtatcgggataagctgcgcgtttccattggctccccctaaggcaggtgcatgcgagcatgggtgttcgtttcgctcgccccattatattgccatttaggacaacaagctacaacattgcaggttagggcctctttctgcaattcaatacccgaggtcaaaattatttcagtcttgctataaacaaattccccgcttcgggaggtatgctccgcaccgtattagccgaatcggttcagcgagggggaacaatgacgagagaacgcataattagcgatctttctgcggcgcacgacggtaccgaagtcaagtatacgtgctgcgctcagaatggatgttgggatgccagctgtatcgtccgatgtgaaacaagggacggcgaactcgtctcgctttccgcagacgacagcattaatgctggcttgccacgcgaggatgtgggcgaggaagcactttggcaaggcatggtgcagatgaggccttgcgccatgggacacgcttggaaaggagagctcaacgctcagacaaggatactgcacccgcttaaacgggttggggggaagggtccgggcaagggccatttcgtcgagatttcttgggaagaagcactcgatactgttgccggaaagcttatggagttcaaggaaaagtacggtccgtactgcatagctcacagcgttgatgatgtgttcgaggactgcggcttcaagctggccccgtggtttggtatgggaatggcggcctggggcgacagctcgtgttcgggaacgacatgcggcgagaaaatgcacctcgggttcgacatggtgggggcgtttcacggcaacaccgacgtgtgcgtcgggttcgaggcgcccgatctgctcaattcgaagctgatcgtgctgtggggccttgatcctttggtgggttggtacgggtctgtctcctactacatgaagctcgccgcagagcgcggcgcgcggatcatcgtcatcgacccgcgctataccaacagcgcagagacgcttgccgaccagtggctccccattcgccccggcaccgacatcgccatgcttcttgctgtcgcctacatcctgtacagcgaagacatctacgatcacgaatatgttgatcgatgggttgagccggagggttttgaggcttggcgtcaatacgtcatgggagaggccgacggtattccgaagacgccggagtgggcggagcccatcacagctcttccagctgaaacgatcagggggtttgcaaatctctatgcaaccagcaagccggttcatcttcacttttactatgctccggcgaagcgacatctcggcgaatatgcggcgaatgcagcgatgcttttgcaggctatgacgggaaacctctccattccgggaggttgcgagacggggtgtagcctgattactcctccgagaatgccgtttcccgctgtcgattggcaacaggcggctcccgagtacgatccccccgtctgttacaacatccaaaagattgccgaagccatcatccaacggccgaacctcgatgacggtaccattgacgagcagacgtaccgtacactcatcggttcgcctccgggctctccgcttccgaacatcaggatgatgatcgttgagaaccagtatcccattagccaccacgagaccaataagcgcatgaaatcgcttgagatgtgtgagttcaactggggttttcagtggcactacgggcaggcgtccctggagttcatggacatcgtgtttccgggcgttaatatgatgttcgaatcgcgcgacaactaccagcttggttcggagcggttcatgtacggcccgaacggcatgcgaaattactttctgtatgccgacaagatttgtgagcgcccaggcgaagtgcgcccaatccattgggtgtacaccgagattgcgaagaggcttggtatcgcggagaagtacaacccccgtctggcgaacgtgccgcttgacgactgggatgatgcggtgcacgagctctatcatgaagcctatgatgcatgggctgccgatccaaccggtgagctcaaagcgctcggcatcgagccgaaaccctgggaggaatttttaaagatgcccgtcgtgcgcattccgatcgacgagcccttctatccctacaagaactacatggaagcggaagaggagaaaagtccatttgcaacgctgagcggcaagattgagttttcctcgaagacggttgagctgctcgatatgaagacgcagtcgtggtaccggggagagctcgagccgattcccgtttacgatcctgcgtatatggggggcaaacccgcaaacgacagcttttacaatcctaaggctgagagatatccgctttctttggttacacccgtctctgcgtatcggcaacacgcatgcctcgatgcgaaccctcagctgcgtgacgagtgctatcgccatgctatctggatgagtcccgtcgatgcgaaaaaacgggacttgagagacggcgacgctgcgcgcgcctacaacgagttcggcgaggtgcacatgcccgtgtacgttacgtctcgcatgatgccgggaacggctgccgtgttccatggagcatggtatacgccgaaggttgaggaaaagacggaaagcatgccctacggactcgatatgcgcggcacgccaaatttcctgatcggcgatgagcatgctccccatatcgtcggggctcttctgacggcagggcttatcgaggttgagagagctgggaggcagtaacaatgacccaatatggatttttcttcgatcaaagccgttgctatggctgccaggcgtgtgccacggcatgcaaagattggaacggcatcgcgcctggccctgagaagtggatgacggtttacgaatgggagtcgggtgctttccctctgacgcggatacacaccctcgcgttttcgtgtgggcactgtgaaaatcctgcgtgcattcccgcatgtcccgaaaaagcgattttcaaggaagagcgattcggcgccgttctcgttgacgatgagaaatgcatcggatgccgcgagtgcgcgaatgcctgtccgttcggcgccccgaagttcgcttccgatgatgagggcgagaagatgagcaagtgcacgatgtgtatcgacaggcttgtcgagggaggccagcctcagtgcgcgcttgcctgcccaatgcgtgctttcgacttcggccccttggacgagctcatcgaaaagtatggcgatactcgttcacttgaggggatgcctgatgcgggcgctctcaagtcggccatggtcttcaagggactagccgagcgcaaggagctgatccctttcgatgccgaaaaagtcatcaggctcaatgccgatcgcggtgagctgccgaagcttttcgaagaggtagctgacgttacggaggtgccggaaggcattgttcttcgaaacgttctcgcgatgaaacatgactcggcggacgatctcatgcgggcaacaagaaatgacttggggtaacggctgagtgcagccaaacatatcagtttcaacgtttgaaaggggaacacgtggaagcaacaaggaaaagcataagcgcgtacaacccgagggtggcttggcttgctcttctcggtggcgttgcgatctacttcgtgaacagcgcagcccaatataagattccacctatcatgcttgagctcaaccaggctttggggttgacgctctcggaatcggggtggctcatgtccatcatgagtcttttcggtttgattttggcattacctgccggtggcataattatgaaaatcggcgtgaaatggacaacggttatcgccgctggatttcagcttgtgggttcgctggtcgggacattcgctggtggtttcgagttgatgctgatcagcagggccctcgagggcgtcgctcttggcctctgcaatgtcgtttcctttgcggtggtaacctcgttttttccttcggaaaagcgaggtgtgccgaattcttgcgtgacggcgctgttcaccgtttcggtgttcatgatgatgaatatcgccgtaccgctcgataacggcttcggttggcagggtatttggtggttcgtcaacatcctcagtgttttggcggttcttgctgctctgttcctgatacctggaaaagacagggagatcaattttgatgaagatgccgagcggtcaggcgtgaaggaaaaggttgattataagaagcttctgatgacgccagcgatttggattctgcccctcgtattcatcgggttcaatatcggttactacggtatttccacctatatgccaacctatctcgtcgaagttgtcggagcggatcaggcaactgctaattttgcggtaagctggaactcgctggttgggcttcccgccgccctcattatcggcgtgatcttgaacaaagtgaagattcccaatcgcaagtacgtgacggcgatcacgatgttcgttcttgctgcctgctactttgtggcatttagcatgccaaccgtcgagtctgcggcgtttctgctcatcttcatgggattcatctgcacctttgttcctgtttctctctatacgattgggccggacgtcattccttcggcggcgtatgcagccatcatccttgctatcgtgactttcggtcagaaccttggtatgacgctcggcccgctggttgttggatacatcgtcgatgcggcaggaaattttgcggctagcgctatgccgcttgcggttttggcggcgatcggcggcgccattatgcttttcgtcaaggtgaggaagcgcagcgccagcgaagcgtaaagggattcggaaaaagccatcggcaacatagaaccaagaagaaccaagaagaaccaagaagaaccaagagagaggactgtcttatgtgtttcaggccatcaaatgcttcggcatccgaggcgaacaagtgccccgagtgcggaaaggccattcccatgctggggggagtcgtgctgatggaatgccctttctgcaaatgtgatttttctccgtacatcaatcccgacgggactcccaagatgaaggcgccgagtgtttcggctcccgcagcgcctggcgcctccttggcaccggacgcccccaagtctccgaagccccctgctgccccgggcgcctctgcggtttcgaagctgtagcatcgggcgtttgccgcgcataggctgtgcagttagtttacgggtgtctgcaacgtagccaagggcagccgaactgatgaaaaacggcccgatccgttgggtttgacgggtcgggccgtgtgttgggcggcggtttgggtccgctccttcaatcttcccgcatgagcctttgcgctaaaactcccgcttctcgtacagcttcaccgaaagcatgcccgacaggacgtagatgattgcgcctgcggcaacgacgatccccgcaacggcgagcgtcccctgcagcgattcaagcatagcgacgagggaattcagtgcaggtaggaaaacgccgtaatcgacgccgggaatgcttccgctcgtgaatacgagcatgacgatgacgaggaagaacaccggtacgtagcgaatcgccttcgtcattccgaaacgggcgatgagcggcagcgtgatcgagagcatgatgaagatgattccgacgggtgcggcggcggagagaatcagcccctgggcgtcgaaatcggcgatgagcgcgtcggcgatgttcggaacgaagtgcgcgacggcgtacacgatgccggtcgcgacgagtccgagtactattcccgccaccatgactatcgccaggctggcatagcgcccggcgatgatgtttttccgcgagagcggcagcacgagacggaactgctcccagttgttgcgctcgtcgtatgcgagaagggtgaatgcgagggagaacggcatcatcacgccgaggaagggcgcgatcatgtagatgttttctatgaacagcgagatggctacaacaaccaccatgtagagcagcgcctgggatttgaaatacttcctgatggttagcaggtcggagaggatcatcgctttcatcgggcatctcctttcagcatcaaacccatgtaggtatcgatgtccgccttgtccagcgcaatggttttgaagttttcggcaaaggcgaagcggtcgggaacgaggacggctgtgccgtaggtgtgcttgaggtagcgcatttcgcccggctcgaagaagccgctttccgcaagcgcatcgaactcggcttggcggcagtgcgcaacgccggcgatatcggtgatctcatccttctcgacggcgaagacgatgcgccccttgtcgatgcacacgatgtagtcggcgatcttttcgaggtccgaggtgatgtggctcgacatgaggatgccgtgtttgtcgttgcacatgaactcgcgaagcacgtcaagcgtctcgtcgcgggcgatcgggtcgaggcccgccgttgcttcgtcgagaatgagcagctcggagttgtgcgcaagcgcgcaggcaagggagagcttcatgcccattccccgcgaaagctccttcacggtcttgttgcggggtagcccgaaagcggcaagaagatcgtcgaaccgtgcgctgtcccaggagctgtagcagtatcccatgaggctgccgacgctggcaacgctcatttcctctggaaacgagcacgtgtcgaatacgacgccgatccgttgctttatcgcggtggtctgcttcgatccggcgcgcccggcgatatgctggccgaacatctcgatctcgcctgcatcggtgccgatgaggccgagtgccgccttgatggtagtggttttcccggcgccgtttgatccgatgaatccgacgacgcttccggcggggacggtcaagtcgatgtcctgcaagtcgaagccgtcgtagtgcttcgacaggttccgtatgtcaagcaagttgttcatggtcgttgctttctatcaagagggtgagcatgtcgatgagatcggcggcctcgatgtcggcgctgcgcgcctcgtcgatcgcctgggagagaagctcttcaacccgacggagcctctcctcgcgcagaagctcgaggttgccgccggcgacgaagctgccctttccctgcacggtctctatgaagccctgggcttcgagatcggcgtatgcgcgcttggtggtgattacgctgatgcgcagatcgctcgcaagcgcgcggatggaggggagctgttggccttcggcgagcacaccgcttaagatgagatccttcatctgcgaagtgatctgctcgtagatgggcttgccgctcgaattggtgatgatgatgtccaacgtatgctcctcgggtttcgtcacgtgaggcattcggcgtcccgcatgccccggtggccggttgcggcgtcccgcgcccgacccggcgggccaagcacgttccttggacccaccaacgggtatagtgtatatacccgatatgcacagcatacccacattatgcacagccgtcaaggggtttccgaaagaacgggagccgcgcagtgcctaaggctttggagcctcgcggtttctcccgcaatcgacgaagcgatttcttgacaaacgcggttgatttgtttctaatgggcgtactcgattccagagcgcgcctgcagtcgatgcgcgcggttccaaagcgacacggggttggcggcggcaaggttcggggtggccgtctctcgagcgaatcaagtgcctgaaataacaataagggggagctatggccgttgtcgcaagcgacgatcagcagcagatgctgctcagcaggagcggggttacgctcatcgcaggcgtcctttcgctcgctgcctactgggggtggatcttttcgacctactcgtcgaccgtcatcaatccgttcggctcggcggggataaccgaatacctcgcactgtgcgtcattgcggcgggctcgtcggctttgtgcatgctcgttacagcgttggcgcccgacaggatggaggcgtttttccgtggaacgggcggcacgattctgctcgctgcgctctcgccgatcggatgcctccctgcgtttctcaatcgcatcggcatggacgtctccttcgtgcagacgctgctgccgtgggccgtgtcgacgttcgtgtcgtctctgatattccttaagaccggtgcgtttttcgtttggctcaaaagagcgaagctgtctcgctgcatcgcgctgagttttttgctggctgcgatgttctacgtgttctcgctgcttctcgccccggtggtgggagtgctcatggtcatggctctccccgtggtctcctgcatttgcacgctcgttgccgaccgctacatggcaagcgccaaaccgcccatcgataagggcggccatgctgcggttgacaggagaaaggagtcgctcgggtcccgtatcgcagaactcaagcatttcgctccgctgacgctcatctacaccatttcgttcgggatcgtgtcgcatgtggtgctgtacctggcatccgcccacgacctgatcatcgtcatcgccgtatccattctcgtctcctccgtggttgccgtgatcggatcgttcgtgttccgcgcgaacttcgaggcggagcgcatccggcgtttgctgctgccccttatcgctgtagcactgcttccgtttccctacctttcgcccgttatgcagatcgtgttcttgtcggtggcggtgttcggcttcacctgtttcgacgccatcggctggggagaccttgccgatgaggtgcgcgatcggggcctgaagcttttcggatacctcagcgctgcatcggctgtaaacttcacaggcatcttcgtgggatggggaatcggctaccttctattcgccttccttggcgaaggcgaatacgccacgggattcggcatcgtttcgatcgtgctcgtgatcctgcttatcctgaatctggttatggacggcatgggggagagcgaaggcggcggcgttgccaacaccaccgagtttcgcgacacgtggaaggagcgttgcctcagcgtggcccaaagctacaaattgaccaagcaagaagagcgcatcttcatcatgctggcgcgagggaggaactacaagcacatatcggacgagctctacatttcggttcataccgtcaagacgcacgtgtaccacatctacaagaagctcgacatccattcgcagcaagagcttatcaacatggtggaagctgaactgtgaaaacgggttctcatacccgatgtaataccgcagtttgacgggaaaatggcgatggcggttcgatgtgccgcgcgctccgcgggcgcaatacttgcactgcatgtattgttgcggaaagggggagcattatgcgtcgcaaagcttggattcccgtgtgggcaatcatcatcgccagcatcctgattgccacacaatacgggaaggttccaccgtcacaaccgtctatgatcgagtcattgggcctctcgtacaccatgcaggggcttttgatgactgcgttctccgcatctgcgcttgtcatggcgctgttcggaggtgtgcttatcgatcggttcggcgcacgcagggtggtgagcgtggcgcttaccgtgtccgtggtcggaacggtgatcggcatgttcatgaccaacgacgccggattgcttgcatcgcgcgttttggagggagccgggtacggggtaaccatgacggccgggcccgtgatcatcgccgcttggtacgagcccgcgaaacgggggatcgtgtcgggcgtatggggcgcgaacgtcggcataggcatgctcatctcgctcggcgttgccaatccgatcctctcgtctgccgactggaccggcatgtgggtgttctcgcttgtctccactgtactggccgccctgctcgtcgtcatatgcgtccgtatgcccgatctggccgatcgccgcgatctcgatgagatcgaggccgagcgggagggcaagaagcacgggttgctgtgggggtatatggcgcccctcgccatgattacggcgttcatgttctttcttgtgggcggggcaaccgatgccttcaacagcttcaccatcacgtatctgaacatcgatctggggcatgcctacgaagatgccaacatggcatcgatggtcgcgtcgttcggcatgctggtgggctcgctcatcgtcggcgtcatcttcgcccgcgtgcgcgataagggcatggtgctcatcgtcaacatcgtgctgtgcatcatcgtgcagttcgcatggttcaacctcgatgcgtccatgccggtcatgttcatcgtggcgtttttcgccggatgcgtgctcggcgctgcgcctacgattttcttcgccataccgccctttgtcgcccgctcgtcgacgacggtgggcgcggcggttgcgcttgtggtgctcggccagaacctgggtaccctcgccatacccacgctcgtcggatcggtgctcgaccacgcgagctattcggctgctgcgtgggtcatgggcgggctgtcctgcgtggcgcttgttgcggcgttcgtgttcagatcgcagttccgcaagcgcgagcaagcgggcgaattgagcgattaacaggcgtttcgccaacctagtaccgttggtcatagtgcttgttccgtatgcgttcagcctcttcttgcatcctgaaatacgatagctggccgatttcggatgcggcgcgcatgcgacagaattccacccatatgcaagaccgaaaacttagaaggaggagaaatggaagacaaaagggagtactctcttgtagaacacgagaagccgtttcgctacgatgaagacggccttcatgtgactcgcgggagcgcatggtccggcccgggctgtcatctgggatgcggtttgctcatgtacaccgatgacgaggggcggctcgtcaaggtcgaaggcgatccggagaatcctttcaacgaggggcggctgtgctgccgctgcctggctctgcccgaggtgatctaccatgaggatcgcatcctgtacccgatgaagcgcgcgaaggaagatcgcggcaaggacaagtgggagcgtataacctgggatgaggctatggataccattgccgagacgttcctcgatctcaaagagaagtacggacctgagtgcattgcgttctactcgggcaccggtcgcgatatcgggcagtatatcactcgactgagctggggattcggcagcccgaacttcgtgttcgcaatgagcgggcagtcgtgctattcgccgcgcgtcgccggctgcttcgccaatacgggcgctttctggctgggcgattactcgcagcagttccccgatcgctacgacgatccgcgctgggttcttcccgagtgcatcgtcgtgtggggcaacaacccgctcgtttcgaactctgacggattgtacgggcactggatcgtcgactgcatgaaacgcggatcgaagctcgtcaccatcgatccgcgccttacgtggcttgctgccaaatccgaatacttcctgcagatcaggcccggcaccgatgcggcgcttgcactcggcatgatcaactacatcatccaggaagatctctacgatcatgaattcgtcgatctgtggtgttacggcttcgacgagctggccgagcgagccgccgaatacccgcttgacaaaaccgctgcgattacctgggtgcccgaagaggatatcgtagccgccgcccgattcatcgcgacggcgaacaatgcgatactccagtggggcgttgcgatcgatcagaccaaggagaccatcccgactgcgcaagcgctgctcgccgtgttcgagatcaccggcaacatcgacaagccgggtgcgatggtcaatcctccgagcatcctgtactatgctgcggggtggggctccgaattcctcacgcaggaacagtacaacaagcgcatcggcttgcccgagtacccgcttttgaacctcggcttccaggagtgcgcaaccgacgagctcatcaagacccttgaaacgggcaagccgtacaagctgcgcgccgcttggctgcagaccacgaacatcctcgcttgcacgagccccgatcccgagcgcacgcttgcggcccacaacaactacgacttcatcgtgtgcgtcgacttgttcatgacgccgaccgccatggcgctcgccgatatcttcctgcctgcgagcaccttccccgagcgcaacggcttgcgcatcggcgatggtatgcagcgcggcgagacgatcaatcaggtcatcgagcctttgggcgaatgcaaatccgatatggagatcgatctggagatcggcaagcgcatttcccccgaggtgtggccgtgggagaccgtcgaggatatgtacacgagcatccttgcggaaaccggctacagcttcgaggagatgcaggaggttgctcccgggttcccgccgttcgagtacggcatgcacgaaaagggcacgctgcgcgaagacgggcagcccggcttccagacgccgacgggacgcatagagctgtggtcgcattattacagccatgcagacctcgatccgctgccgtacttcgaggagccttcgcccggacccggcgcgacccccgagctgctcgacgagtacccgctcgtgctcaccaccggtgcgcgcatttggagcatgttccactcggagcatcggcaggttccccatctgcgcgccttgcatcccgatgcgatcatccagatcaatccgaagacggctgcgaagtacggcgtgaagcacggagactgggtatgggtcgagaaccagcgcggccgctgcaagcgccgaatcgtcgaaacgccggtgatggacgagcgcgtatgcagcaccgaccatgcatggtggctgcccgaagcgcccggcgagctcgaggacgggctgtacgggatgttcgatctcgacatcggcaatctcatcgaatacaaatgcggaaaatcgggattcggcgccaattacaagacgctgctctgcaagatctatcccgtaggaagcgaggaatagaccatgaatgcatacggtttgcttatcgactaccagtggtgcaccggttgccatacgtgcgaagtcgcgtgccagatggagcacgggctcccggtggaccaatgggggataaagcttgtcgaggtgggtccttgggagtatgctcccaagacgtggcagtacacatacctgcccgtaccgaccgatcagtgcgatctgtgcgctgaccgcgtttcgaagggcaagattccgacatgcgtgcaccactgccaggcgaagtgcatcgaatacggacccgttgacgagctcgcgcagaagcttgcagaaaagcccaagcagagcattttctgcccaaccgagaccaactaaaggagccgccacatgaagaagcacgcctggattcccgtgtgggcgataatcatcgccagcattctcatcagcttcgaatacggcaaagtgccgccttcgcagccgtccatgatcgaggttctcggcctgtcctatacgatgcagggcctcctgatgaccgcgttttccgttgcggccattgccatggggctcatcggcggcacgcttatcgatcgtttcggcgcgcgcaagatcgtcagcatcgcgctcgtcgtttcgatcgtcggcaacgttttgagcttgttttggacgagcgatgcgggtttgctcgtgtcgcgcgtgatggagggcttcggatacggcgccgtcatgacgggcggtcccgtcatcatctccgcatggtatgcacccgccaaacgcgggttggcctacggcgtatggggcgccaacgtcggcgtcggcatgcttatctgcaccggtgcggcaaatcccatcctggccgtttccgactggtccggcatgtgggtcttcgcccttatcggcgctgtccttgcgctgctcatggttgcgatctgcgttggaatgcccgcagatgaggatcggcaggacctcttcctcgatgacgggtcgaaagcggaaaaagacgcgaagcacggcgtcctgtggggctacctcgctccgcttcccatcctggcggccctcatgttctttttggtgggcggtgcaaccgatgcgttcaacagctttacgatcacgtatttgaacgttgagctgggctacgattacggtgccgcgaatctctgctcgttcatcgcttcgatcggcttgctcgtcggggcggttatcatgggctttgtctttgccaaggcgaaggacaaggggctcgtgctgatcgtgaacatcgtgcttgcggctatcggcctgttcatctggttcagcatcgatcttcctctcgaggcgacctatgtgatcgccttcttcatcggctgcgtgcttggcgccgctcccactgcgttctttgcggtggcgcccatgacggctcgctcgaaggataccgtgggctctgcgaacgccgtcatcgtgctcggacagaacatgggcacgctcgtgatcccgacggtcgtcggcatggtgctcgatgtctcgtcgttcatgatggcggcaatggtcatgggcggtgtttccgtggtggcgcttggcatctcgtttgcctggcgcagcctgtatcgcaagaagatggagccggcgaagtaactcgctggtatcgcgcgcggagccgttcgctcgcgtgttccgcgcggcgtctcgcaagtgtggggcgtcatgcgatctgttgttggcgggcgggcctccttggaaggcccgcccgctttccatatgccgccgcagcgcaatgtctgcggcgacgataggaggttttccgtgtgctatccctgtaagggttgcggcaaatgcaggccgaagttcacccagcaaacctgccccgaatgttggaaggaaaacgagcaaggcgttctcgagtgcgcattctgcggctacgtgtttccgccgcgtgcgggcgtgtcggcttcggcgacgggaaaacgtgcgggcgttgcgtaccgtgaaaagcgaaggtgataaggggcgcatcgggcttgcccgttcgagcgctttcacgaagtgccccgaggcattcttcggctgggtcgggagagtgcggcgtggagcgtgggaatttcacctcattcgcctgcgcttttcgtgccccctcacccctttcagctgatgccgagcctgccttcctgggccatcctcatcctgctcccgccgataagctcggtgggcctttgggcaaaatagacaaagaaggggtagcgatgagtgagaaaaccaatatggacagaagatctttccttaagggagcagcgctggtggggggaacagccgccatcatgggggtcgcggggtgccaaagcgctccgtcggaggcgtcggatgcaatcgagtgggatgaagagtatgatgttgtggttttaggctctggcacggctatcatggcggcgcttactgcagctcgaaacgaagcaaaggtgcttgtcgtcgagaagggcagcgcaatcggcggcacctccattcttgcgggggccttctggcttccttgcaatccgctcgagaaggaaaagggaatcgaagacaaacgcgaagatgccgtcgcctatgcgaaagcatgcgccgatgcgtggggcggaaaatacgacgacgccgttattgaatcgtatttcgacaacggtcttgcgatgtatgacatgctttccaatgaattcggctacacttttacacttgatttgtacgcgaagcctgattatttcaacatcgacgggcagttaggggagggtcgctctgttggcttttcgcaagatggcaagcacatcaagcatgccgttgtttggccgatgctccagcagaaatgcgaggaactcggggttgagttcaggaccggagcccccgccaccgagctagttaccgacggaagcggggcggtcgttggcgttaagatagaatcgaagagctctatcaaggccatcaaggcgaacaagggcgtggttgtcggcacggggggctttgacttcagcgaggatatgaagtctgcgttccttcccgctccgttttcctactccatggccgttcagacgaacaccggcgacggtcagcgcatgggtgcttctattggagccagcctcgcgaatatggggtctatctggggatgcccgagcaccttgctcgacgaagcgtcggaatcctacgaagtggactggggcagctatcggggtaagcctggaacgatcgtcgtcaaccgatacggggagcgtttcggcaacgaatcatcggcttatccgatcttcaataggtcattcgaggtttgggataccggtaggaacgactatcgaaacattcccgctttctttatttgcgactcttcgtacgcgcagagatatccttttcctggatcgaattatgaggtaggcaagattccggaaggcgcgctggtggcagacacggttgaggatctttgcgaccaagccggcatcgatcgcgtaggctttgcggcgactctttccgctttcaactccaatgcggttgagggcgttgatccaacgtggtgccgtgggacgagcgtttacgacctttcggctgtttctggcgatatgaagcgagacgacatcgtcaacagctgcctcgctccgattagcgaacctccattttatgcgatgcgacttatgcccggatccatcggtacaaacggcggcctggagatcgacggcaacggtcaggtactcgatcagggtgggagccctatctccggtctttatgccgtaggcaacgcttccggttctgttttcggtggtgcgtacccgggtgctggcgcgaccataggatccggattcatcatgggcttcgccgccgccaaccatatgactcagtcaggtgccgaataaccttttcttcggcatgtatcccaggggaaggaacgctatatgtctttcttcccctggacgaggtcaatcagctcttgccttgaatgaaccagggtcttccgatagatgttctgcacgtgggtttttgcagtattatggcttatgaaaatagtcttctcgataaacggaagactcctgccttgcgccaaatatccgaatacctctcgttctctagcggtgagtccgtaacgatccgccacttcgtcgcagcgcgaatcgaacgtcgcttggccgtctttcgatgactcctcaccgtttgcttgcggaatcgatctcgcgtagtcaacttccacgacgttcccgtctgtcagaatcaggacgggaacgagtgtgatcaggagaattcccagcgcagaaaccgccatatagaaataaccctgttcggttatgcccgctccaaggaatatcgacgcgccggctccgaccagaaaacccgccgagtccgcaaaacggccccagccgaacaccttgcgcgcgggctgtcctgaccgaaacataatgtcggaataggcgacaaggctgaacaggagataatacacgtagccgctatgggcaacggcggcgacaatcggggcgtgtgaagcatcgagaaacggaatgataaggcagccgagggcgatgattgggatagtggggcggtacgtaaagcctcggtcgaggtttttcccgaaaaccagcaagcccagaaggagcagcgcgcaaatcaagaggcgcgctgcaattgcggcatcgttgctttgttgaaatgcggcggtatcggtgaacgaggttgcatttctaacgaggcttccgaggatgccgtacacgaagccaccgaggacgagtttccatggaagggggatctcgatcttccaattgccgtacttccgattgtcattgtcgttgacgggctcgacaagagctgggacggacatgcccattttgcgagcaagaaagagggatgcgccgagcagtacggctacgctgacccctttgatgggcgacggaatgagaaggatgagcccgtaaagggcaattcccacgataaaagacgacgtaattgccaaccccgcttttttcgcgcccaatgtgccgagcgattcgccccagagaagcagcaacgatgcgcttccgatacctgcgcagaatgcgcccgaaatacagacgaggattccagaactggtttgggcgtcggcgaaggagctgaaaagaagggcgatcacgaatactgtaaaaattgctggaccaaaaaggcgatgcctcgaaaacggaaagaacgaagctggagcatttgccgaaacgagcattgccgcagcgtttccgaccatgaatgcgatgcctccgtactgactgagcaggttcgagtccgaagacgattggtatagagcatcgctaaaagcgaatatgttaatccacgcccagtataggctaaatccaaacgcgattgccgtgattttcaatatacgggactttcccttttcgattgcaaccacctccccctgaatcgtcccagaagatctcaggattccgatagcgtattatcaccgcatctccaacgattctcgcagatttttcgctcgaaggagggggcgtaagattgctgggcttggcttctgtccagcggctcgtcctgtgcggagatcgactctggcggcacagcgcatcttgatgctcatgccgacgacgttcgcttgctcaggcgggcggccgcggtcgcctgattgtaccacagtcttactggcgtctagggaagggtcttcgacgtggacggtatccgcgctgcgcggcgcagatttacgttcagggcggaaggcgcctgtttcccgtgcctacagcgtatcggtgtcgagccagagcgtgaacgggccttcgttcacgagcttcacatccatcatggcggcgaatacgcctgtagcgacgtagggcacatccctgcgtgccagatcgacgaagtgcccgtacaggcggttggcctcatcgggcgcgcccgcttcggtaaacgagggacggttgcccttcttgcagttcgcgaagagcgtgaattgagacacgacgagaacctcgccgtgcacatcggaaagggagaggttggtcttgccgttctcgtcttcgaatatgcgcagcttcgatatcttcgtccaaagcttgtcggcttgcgcttttccgtcatcgtgtgcgacgccgagcaggatgacgagccccttgccgatcgagccgaccgtttcgccgccgatatccacctgagcttgcgaaaccctctggatgagtgctctcacggcggctccctactgtctggccagcacggggttcacgtaacgtccgcgcgcctcggttttcttgccgtactgaatggaatggaaggggcagcggtgcaagcacccaaggcactgcgtgcagcccagttccgcccagcgcggtcttccgtcgatgatggtgatggtgttcgtcgggcagttgtctgcgcaccgcccgcagccgatgcaggtttcaagcgtgtagaactccgctgtcgagcgcggtttttcctcgctttcggtaaacttcgacaagatcagcccgagggggttgcgcgcttccttgtgcacgtcggcgcgtttcttcacgtcttcggcaatacggtacgatttcgcgagggcgtcttcgaggattcgttcgcgcttcctgccttcggcgggtgcgtatagataggtgcagttgccaaccgatttcacgctgaacgatgcatcgacgttgatgccttgcgttcgccgcagctcgtcggcgaagaatccggcggcgttgccgacgaacgcgccgcaggtgagcacgacgtaacagtatccgggcatgaagggttttccgtcccggccggtgaagcgtgcttttttcaggaaggcatcgatgatcgggggcgtggtccatgcgtatacggggaacacgaatccgaggttttgcccctggatcatcgtgaaatcgaactgcttgtatttgtatgcagtgccgatatcgacgatcgtatcgttggtttcgtcgccgaggatctgcgccgttgcgagcgagttgcccgtgccggtgaagtagaagatcatggtagcctcctggttggttactggcatccagtatacgcaaacggtttgcggatatgtgccgatcaagacacttgttgataacgcgtaaggggatcgatcgccccgcatcatgcgcaagatggcctttgcgggcacgcaacctcattcgcgggcggacggctgcgggtgtgcaacctttgcgcaggcagtgaaactgcgggcgcccggactccgcctcaaggagcgtctttgctatcatagggcgaaacgcgaaaggaggcccgtatggccgatgtcacatttatctggtatcccaaatgctcgacgagccgtaaggcgaagaagtggctcgacgatcatggcattgcctacgtcgagcgcgatatcgtgatcgacaacccccaagcggcagagctcgaagaatggcatgtgatgagcgggcttcccatcaggaggttcttcaatacaagcggcatgatctaccgcgagcagaatatcaaagccaaacttgacgcaggtatggccgatagcgaggcatacgatcttctggcgacgaacggcatgctcgtgaagcgtccgatcatcgttggcgatgggttcgtcctgacgggctttcgcgagcccgattggaaaaagctcctcctgtagacggtgtttagaaagcggtatgaccgagcaagcatacataaccgtcgagggtagggcctcggcggaaatcgtcgaaaagaagagccgcttcatctcttctatcgctcacgttgaaaccgaagaggaggcactcgctttcatcgacgaggtgagggccgccaatcgcatggcgcgccacaacgtgtacgcctacgttttgcgggaaagcgggcgggttcgctattccgatgatggcgaacctcagaaaaccgccggcttgccgacgcttgacgctatccggcacgccgggcttaccgatgcgattatcgtgacgacgcgctatttcgggggcatcctgcttggcacgggcggtctcgttcgggcgtacacggcctcggcgcaggcggccattcaaaaggcggcgatcgttaccgtatcgcggtgcgtcgatgtgcaggtgacgctgccgtattccctctacgatcaggcgctgcgtcttgccgaatcctgtggcgcgaaggtgcggcgcagcgatttcgccgaagaggtcgccttggtattccgcatgcttgacaaaacgcaggggcctcttgaagagggcttttccgagctgtcgcgcggccagatccgcgtgcagacaaccgagccgttcgatgcggtgttctgatcatcgggttacgatttggaaagcccgtttctccacgcgggcaacactgctatgatggcggcgaaaggatgaagccatgaagtatctcatcacctttgccagcaccacgggcaacacgcaaaaacttgcgcaggctgtgcgcgaagttctgcctgccgatgaatgcgtgaacttcggttcgaccatgatgatcgcgcagcacgacgtggttgaagccaaacgcgcctacgtcggcttttggaccaatcggggcacatgtcccgatgcggtcgccgaaatccttcagagccttgcgggtaaggaggttttcctgttcggcactgcgggcttcggcgaaagccaggattacttcgatggcatcttggcccgcgtgaaggaaaacgtgcccaagagcgcccgcgttatcggcacgttcatgtgccagggcaaaatgccttcaagcgtgcgcgagcgctacgaagcgatgctgtcgaatccgaacgaagaagcgaaggcgcggttcctcatcgagaatttcgaccgcgcgagcagccatccggacgaaggggatctcgctgatctcaaacgggcaatagaaagggtgcggtgagctgtgaggccgagcgaacttcccaacgtgggagcctatgcggaacagcagctgaccgaggccggcatcgattcggccgaggcgctgatcgatctgggcgccgaacaggcgtggctgcgggtgaaggtcatcgatccaggcgcgtgcctgcacatgctgtacgcgcttgagggagcagtgcagggcattccgaagaaggacatcggccctgaacgaaaagccgaactcaaggcgtttttcgacgccgagaagtaatggttttcacgcggttggccattgggcgcagcgggcttctctgcatcgaagccggcagcgcagatattcccggccgacctgcgggctatctcccccaaataagctgggccaagaaacggcccgccactacgccgataagacagagtgcgaggctcagtccgatgtacacgacgccgagtccggttgcgcccgattgcagcagatcgatgctttcgaggctgaacgtagaaaacgtggtgaagcctccgagcgttcccgttatgcagaagagcttccaagcgccgctgccgggaaattcgttctgcatgaagaaatgcgaggcaaagccgatggcgaagcagccgacgacgttgacgaaaatcgttgcgatggggaagcccgcaagagcgtgttcggcaggtatggcggcttgggctgccagcgcgatcaggtatcggccaacagccccgatggcaccgcctgcggcgacggccaatatattgagaaacatggtatcggctttctttcgtagtgtacgatagatgcagcaaaggtattgtacgccatgtcgatgcgttgcatcgtttcaccgaaaggggcaatcgtgaaaattgtactcctcgcagaagaagcccgtacggaagctatgatcggcgcgctcgtccagctttgggaggcatcggttcgcccgacccatctgtttctttcggaaagcgatatcgtcgagcttcgcccgcaggtttcacaggctcttcggggcgtgcgtgcgctcgccgttgcgcttggcgaaggcggtgcgcccgaagggtttttgggcgttgaagacggtaaagtggaaatgctgttcgtttcgcctgcatcgtttgggcagggggtcggcgggctgctcctcgattacgcggtagaggctctcggcgcccgcggacttgatgtgaacgagcagaaccctcgcgcccgcgacttttacgaacacagggggtttgcggtggtggatcgctcggacttcgacgatcagggcaggccgtttccccttctgcacatggagctgaagcgtgcgaaagacgcaggttgacaggcgcgtccgtgcacagaaatcgagttaatttggcaaaaacggcctcttcgcggcgcacgcatactcgcatggttgttgggcaagcgcggcgtgcgcaagctgcgcccgttgaagcaagtgcagtgcgtgtttgcttgcgcgcccgttgaagcaaagcgtcctcttggcgggatggcccgacgagaacgaaaccgcctttacagaaacgcggccacgcatgcgagcagcacgacgccgagcgatgcggcaacggaatcggcgcgcctgatgcgcgtggaccgaaggtgggtgcgtgcgccgccggcgtagcaacgcgcgtccatggcgcaagcgagcgtttcggctcggcgaaaaaggctgatgaatagcggaacgataacggggatccaggctttcgcccgtttgacgagacctccctcgtcgaggcgcaggccgcgcgcttgctgtgctttcgttacgcgttcggcctcttcgacggtcgagggaacgaacctcagcgtgagggcgcagactattgcgatgtcttcgacgggtgcattgaagagggcgagcgggcttgcaagcgagcggatcgcatcgacgatgtcgacgagcgtgctcgtgtaggtgagaagcgatgtcgctgcaacgaagagcgcgatacgcagcgcgaagaaaagcccggttgccgcaccgtgcgcgctgatgccgaacgatccgatcaatgcgatggttcccccgcttgcgttggaggcgtcgtttgcggaaaacgtgaaagagttgactacgatggtgaaagccagaatgtacaggatcggcttaagcccccgcagggcaagtccgaacggtatgcgcgcagcgccgtatcctgcgacaagaagcgccccgcaaacgccaatgccgagccaccctgctgcaaggaagagggcaaccgcatacgcgacgacgaggactatcttcgcacgcgcgtccagacggtggacgatgctcgcctttgaaacgtattgtccgagactgaaggctgcggccatggcaaagccttaagatcgctttgccgcaatggcggctgcgtgcctttgtgcgagccgatcgtcagcgcgaccgccctgggcggcagtgctcttcagtggagacagggccttgagcacgccgagtgcgacggcgccggttgcaacgccggtaatgcaggcggcgatgatcatgacgggaagattgacgagcaaagcgggcgtttgcatgatcgcgatggcggcgcagatttggccgatgttgtggagcagcgcggcgatgacgcttaccgcaacgagtgaaagcctgccgaaactccacgcggcgtacattccgagataggccagcgagcttcccgccagactgtagagggccatcgagggagcgccgatgatcagcgaggtaaccgcaaccttgaggagcatgactgcgagcgcccagcgggggcccatcagatacagagctatgagcacggcgatgttcgccaagccgagctttacgccggggatcgtcacggggacggggatcgtcgcctcgaggtatccgagcactaaagtgagcgctgcgaacagggcgatgtaggcgaggtgtttcgttttctggctcatggggattcctttccgctgcgctgtcgctagcttgccatgctgtcgacggcggccgattcgccgccctcgatgctcacgatgagcttatggggaaggcagacgatgatttcgccggaaccgctgatcgcaccctggtcgatgcaatcgtggccgggacaatcggctgaggccatgctcgcttggccgttggcaacttcgacgatgttctgcccgagctcggtttcgattgtgtacatgccgtcttggctgagggggattcgctgcgtttcccctgcgccgtcggttatgacggccacccgatcgtcggcatcggatgcgaaggcgaactgcatgcacccccatgctgcaaacgctgcgagcagcaagccggctacgagcagcagggtgctccgcgtgcccttcttccgaggattgccggacggctgaggcgcgggggttgcctcccgatgcccggctgttgtctgcggtgcggcgttcgtgttgacgatcgacatggcgtttcctctttcagactattctttcgtgcgaagcggttcggttttcattcccgatgatgcgatggacgagccgtcgacggcgatgaaaagcgcttcgagtcctgcgtggttttcaacgaactgcatgcccgcgctcgcgccgagcagaaaagcggtcgtcgtgcacgcatcgccgtcaagcgacgaatcgcttacgacggtgacgctcgcgagcccgttgtcggcgggcatgccggttgcggggtcgagcaggtggtggtagatgcgcccggcgctttcgaaggaccgctcgttgataccgcttgccaccactgatttatcgataacgggtgcggcggcgaatgccgtgccgcgcgcctcgttgggatcctgcaaaccgacctgccacggcgagccgtcgggtcttgcgccgagtgcgtaggtgttgccgccgaggttgataagcgcgctttcgcagccgttctctctcagcaggctcgcgatgtcatcggcgatgtagcccttcgctattcctcccagatcgatgctcgctgcgggatcgagcagctgcaccgtcgtgccatcgagtcggatggtgcgatagtcgacgtgggagagcgctcgatcgaggtcttctcggttcggcgcgattccctctttgaagtcccagagcgaaacgacgcccccgatggtgatgtcgaacaatccgttcgactcctcgctgtagcggattgactgcgcgatgacgtcggctgtttcggggtggatttcgacggggactcccattgcgttgttgatggtgtcgacgtcgcttccgggtacggttttcgaaaagatgttttcgaagtagacgaggcgcttctcgacttgctcgagcacgctttcggggcacgtcgcctcgatggtgatcagcgtgtcgaacaggaatgccgaaagagtggcagggccgttgtccgttgccgcgccgcctgcagcgccttcgccgcttcggggtgcgagccccgcggcgctggcagctgcggatgtgcagccgccaagcgctggtgcgagactcgccccaaggagggaaagggtggcaagcgagatgaagtgtctgcgggtcagcatgtctgcacctcagcttactcgaatggatcctattgctctgcgatggcttcggcggcaagcttgccggaagtcaatgcccagccgttgttcgcgccagagggggagttcgatcccatgacgccgccgacgacttcgcccgaagcgtacaggcccttgatgggctcgccgctcttgttcatgacctgcagcgaatcgttgaccacaagcccgcccatggtggttgcgtagcggggtttctgctcgaccaggtagtaggggccttcgccgatcttcattttcaggtagtcgcccgagcgcccgaactcgtcggttcccgcatcgacgccggcgttgtagtcgtcgaccgtcgcctgcagcgttgccggatccatgccgagcacgcctgcgagctcctcgatcgtgtcgccgtgcgcgaagatgggggtggtggatccgtttgcctcgaggtatccctcgacggcctgcgtgttgaagccggtgtccttgagcttggtgctccacacgtcgaagttctcctgatccatcaagaggtagagcatcgaatcggtctgctcgagctcgacttcgaggatctcgtggttggaggccttctcgttcacgacgcgctcgccctcggcgttcacgaggatcgtgctcatcggccatacgagcaggttgccgtcgatcgtcgacttggcgcgaccgggagatacctcggcgccgttggggtactgcttcgcgtactccatgaggcgcgtgtcggcatcgatgcccgcggcggtcgccatggtcagaccgtcgccggtcgatcccatgaggccgtagtacagcgagttctggagctcttcggtcagatattcgtcgctattgccgtaaccgcccgtggcgagcacgaccgaatcggctttgagggtgtaggtggtgccgtctttgccgactgcgttcacgccgatcacggcgccgttttcctcgatgaggctttcggcggtcgtgtcgagcagcacttcggctccggaatctttcacggcttggcgcagcgattcggtggcacctgctccgccgcccgcgtaggcgagttcgcggttgtgcgagtactctgccaggtcgtgcaggccgccttccatgttgtactcgactccgcaggattcgttcacccagtcggtggtttcgccgacgttgttcgcgtagagctcgatcagctcgggaacgcagatgtcctctccgttcttctggaagtcttcgaccatggattcggcgctgtcgtcggtgacgcccgcttcggcttgaagcttgcttcccgtgacgacctggttgccgccgctcacggaaatcgaaccgccgagacgataggttttttccacgaggatgacgttcttgccgagctcctgcaagcggatggctgcggccatgcccgctccgccgccgccgacgacgatggcgtcagcctgcttctcgacggtctcggtcgatttttcctgcgcaggcaccttcttgagctggcttgcattgccgcccgcctgctcgacgcagtcggtgatggcggccatgaggccgaggctcgacatggtggcgccggacatcgtgtcgacgccgaggctctggtactcgatgacggctgccggaatggtttcaagcgcttctgcggcaacggtctcggtttcggattgcgatacaaccttgatgtcggtgatggcgtcttcgctgaacgtcacctcgacggtgatatccccgccgttgcccgtgccggtgcctgtgtaggttccgggggtgtattgcgtctgtgcggacgaacccgacccttcggtgccgctattgttcgggctgcatgcgatcagccccgagaataccagcatcatgctgagcgcaagagcgaagacgcgtgcgagggttgcttttttggcgcccccgatcggcttcggcatatgcgccgttccctgttcggttttcatcgtacctccttgtaggttcttcttttgtgcttggttcttcttattctctgcggctgtattaaccgcacgcccatcgtatggagcgcggttggcttcgataagagccccaaacgggtcgaatgcggttttcatgccacccgaaacgggtcttattgcacgtcgaggcgtattgccggcggttcgctcggttgtttgcagcctgccgcaagcgctgcgtcgaagccgtttcgcggcatttgccgcagcgcggtttttcgcagcgctgcaatgcgcggttcgccgtggcggcatcgatagtgcgggggaaatggtacaatcggacatgttgttttttgcggcaaggtgggagcttcatgcggttcttcaagacgattcagccgtgcaacctcggcttgatgtgcatccatatatggatctactgctccacgcaccgcgcccttcccactgacggcatgccgctcatgacggtgatgtacctcgtgttgtccgtgtctctggttgccatggtgcttgccgatcgcgcacggccgcttcccgaaagcgcaaagcggcgtatcgatgcggcatcggccgccttcatgatgggctcggcgtttttcttggcgtttccgttgcctctttccggcgcattgaccacgtttgcgggagctgttctcggaggagttggcgtggggtggacgtatgcgcgctgggcggagttttactcccagctcgacatacattacgcggctccgctagtgcttctgacgatggcgctcggctctctcgcgaagaccgcggtggatcttctgccgcctgttcccgcgacgatcgtgctcgtgtgcatgcccgtcgtcgcgtatgcgacgctctatcgctcgactgcttcggtgcgtccggctcccgaggcgtatcgctactacaacagccgcacggtgacttcgctttggcgcgtcgggttcggcatcgccgtctacagctttacggtaggggtcatccaatcgacgccgctcgcgcagctggcgtcaaccggcgcggtggctatcgtcgccaagcatgcgggcgagataatcgttgccttggcgctgctcgcatgggtcgtcgccctcaaaagggggttgtcgttcggtcgcatatggaatctcgtgctcgtgcttatggctacggcgctcatattcgcgccgtatctcgaagatgtgatgggcggctatctcttcacgttcgtgggcgttgcccagacgtttgtcatcatcatcttgtttctcgcgctcgccgacatcgcgcgccatagctcgtatcgggccatcacggtgttcgcggcgggatggcttgcgtacaccctgccctttgcggtgggggatatcctcggcgagtcgctgcaggccgtcactcccgatgcgtcgatggtcatggcggccatcgtatggctgctcgtcatcgttacgctgttcttcttcgacgaatcgtcggcgggcaagagcctcatcttcaccgagctgaacgacgagggcgatgaggatacgtcggcgaagcggttcggtgctcagcagcaggcgctcaacgaggagaaggccgccgacatgctttcgcttcgctgcacggcgctcgcccaaaagctcaagctcacgccgcgcgagcacgagatcctcgagctcatggcgcgtggacgcagcaaaacctacatcgccgaggcgttcttcatttccgagaacacggtgcgcggccatgtgaaacacctttacgcgaaacttgacgtgcacagcaagcaagagcttgtcgaccgtgtggagcagaccgaagtacgggggtagagtttgaccagggggtgtcgagcactgcccttcgatcggcttttctctccaggttcttttgtttgggtctggatgctcccttacccgctctgccgcccttgaacctcgcgttcattgccgaccatcgccaaggattaacaaatagaaagagctgtttcgaaatctcaaccccgcattaatctttcagaatggaatcagcttgcggttctgcatatgctgggtgtgcgaagatctgaaaggggagaacatgatagacgatatggaggctcgcgggtcccagagcggcacggcgttgacgcgccgtggtttcgttaagggagcggcatttgccggcgcactggttgcggcaacggcggcaacgggatgcgctccgaaatcaaccgagggcgagggcgcgacaacacagccgcaggcgcccgaagagcaggtttaccttaacagctgccatggaaactgcggcagaagctgcgcatgggacgttacggtgcgggacggctatatagtcaatgccgaacctcattcgtatgatgatgatccagaagacattcatcgtggcggatgtaatcgcggattgctcaatattcagcgaatctacgatgccgataggctgaaatatccgatgaaaagagtcaatgccaaaacggaggaagtgcccgagtgggagcaaatctcatgggatgaggcaatcgaccttatcgttgaaaaatggaaggcggtcattgacgaggtcggcccaacgggaatgggtctctggcatgtatacggctcgtctgcgtttctgagcggcaacggattcggcacgtggggccggcttcagcatgccctcggtgcggatatggttgttacgggagccgatatggctacgatttacactatgacgctcaacagcgccgttaatacaatcgctcccgattcgcttcgcgaggcggaggcgtttgttttctggggtgcaaacatcgccgaaacaaaatggccggcttggcgatgcgctcacgatgcacgagaaggcaagggcgctctcttttacacgattgatccccaatcaacgattacggcgttgagaagcgacaagcatataacaatcaagcccggtaccgacggagctttggctctatccatcatgaacgtcatattcgaaaacgggtgggaagattcggagtttctccaaagcaagacatgcgctccctatctcgtcaaagaagattggacgtgcttgcgcgagagcgatttcggtatagagatcgaggatggcgaacctgaccgcgtgtacgtttgggatgtctcgagcaattccgcgaagccgataaccgaagtcgaaaacccccagaatatggctatgagcggagaattcgaggtagaagggcggaaggtacgcacgacgctcgatcttttgaaggaaagggccgcatcgtatcctctcgatgtttgcgaacggattacctcggttgcccctgaggctgtaaaggaacttgctgaggtgatttcgacaaagcgcacgatgattcaaaaagataacgggcatgcccattataagaattcaccgcagacggcgttggctcttgatgcgttgataatgatttctggaaacatggggaagccaggctgtggaatatacgctatgtatgcctcgggcccgacaaaccccgattttgcgaagacgggaacgcctgggatctctattcccgataacaagatcctcgaagtcgtcgaaacaggcaaactcggagaaaaagacgtgccgttgaggggccttatcacgtatgcggggaatatcgttggaagcggtgccgatcgaaacgccattgaaaaagccctccaagaacttgactttgtggccgtcgccgaagtgcgcatgacggatacctgcaagtacgcagatttgctcttgccggtttctcactggtgggagcgcgatgacgtgatgaactccggcgcgaatctgccatattttcgcattgcggaaaaggcggtcgatcctccgtttgagtgtttatccgactatgaaattacgcggagaatcgctgaaaagatgggtgttggggagttcttccagggaagcgatcaggatcagcttgctcaggccctcgatagcgatgccaatcgtgaattgggttgcacgtacgccgacctgcaggagaagaagacggtcagggtgattcccgatggtttcaacgaagctgctaatggtgtgttcggcaccgagaacggacgagttaatttcttcctcgatcgacccaagccctatgtcgattatggtcaggaaatcgacccctttgagtacagcctgcctgattttgctgagacggctgaggtgcttgagagcagtcctctcgcggagcaatacccgctcatcttccttacacctcacacgaaatatggaacgcagacgacgttccatcatgccccgtggttgcatgagatcatctccgaacccgagatccacatcaacccagtcgatgctgaggcgcgtggtgtcgccgacggcgattacatgcggatattcaacgatcgatctgaacttgtggcgaaagcgaagttcaacagcggaataatgccaggcgtcactgttttgtaccacgggtgggcagaggagtacttcaaaaagggacattaccagagcatgagctcctctttcaatagcgatgatttcacgaacaactcaagctacttcgacgttcgcgttcaagcggaagtttataaggaggcatagcaaatgcagtacggaatggttatcgacacacatcgctgctacgggtgcaacgcatgcgctatcgcctgcaagttgagcaacaatctctccaagggcgtgtggtggaacgctgtcgtcaccgaaggaggggcaacgcgcgacacggcttcgggggaatggccgaacaacgtcatgcgtttcttccctaaagcgtgccagcattgccgcaagccgctgtgcgtggcctcgtgcccgacgggagcaagccagaaaggcgacgatggcatcgtattcattgaccaggagctttgtatcggctgcgggacgtgcctgacggcatgcccttatgaagtccgtacggtcatgcaggatgatccggaatactaccaagatgttgccctcggtcaatgggacgcgcccgagcataaggcaggcaaggccgagaagtgcacgttgtgctcgaatcttttagagcgcgataaggagccggcttgcgttcgggcctgcagcatgcgtgctcgcatcttcggcgatctcgacgatcccgagagcgaggtcagcaaggtcatcgagtcgggcagggagtacctgcaactccatgaggagagcggagcggagccttcggtgtattacctgctgtaaggaactctgctttgcgatatgacggtattggaaaagacgccccgagagcgcgctgctctcggggtggaatcgattggggcgctatggatgccatggatggcgggagatgggaatcgcgggcaatgctgtttcgcatgcttgcgcgcggacttacttgtcccgataaggatatgtgcgaagcgattgccgatggctcgttcgccgtggaagcgcaagggttgttcggcgccggtgcgggttcgcacgagaacggccaggatttcgaagaactgctcgaagagctggctcgaacagcggaaactcccggtttgcttgagactttgagaagggagtacacgcgtcttttcacggcgcctcaaggtgctttgatccccatttgggagacgatcttccttgatccggataaaacccagaacgagttcggagcgatcctcattcgctcgagagaggcggccgatgctcggagcagatacgaggcggccagcgtcagcatggcaacacgggagtccgctgatcatatgcgtatcgaatgcgaattcacgggttacctatgccagcgcgtgcagcttgcagcgaacgaaagcgagcgagatagctgggcagagcacttagacggcttcgtttcggttcatctcgatcggtggttcaaacccttttttgatacacttgcaacatgtgctcggcatccgttttaccgagcggtcgccgtcctcggtcaattggtcgacgtgggcaagctgagaaaatgatggcgcatgcggcgcagcgctttgcgtagtcgccgatcgaccggatggaggtggaaagcgatgggggaacggttgaggaggctgcggatcggtacgcttttcgttctcgtgctgctcagcgttattctcgttgcgctggtctgctacgtggctttctcttcccagcagcactcccagcaagctgaaagccaattgctcgctcaagctcaagcgtttacgaaagaaatggatgccgtatggcaattcttcgatgtcaaccaggacaccatcaactatgacgaagagggcaacttcgaattcaagggtctgtactgctcgattgtgggcaaaggcgtcggggcgatcttttcggcgggtagcgactatacggttcgatatacaaacgtcgaagtgagaaacaaatttgataggccggatgagtttgagtcggcagctctggcggcatttgccgatgggtcgggcacgactgaatactacgagatgacggtgtatgaaggaaagccggttttcaggtacgtttccgcgatccccctcaagaagagctgcctgcaatgccacggcgagcccaagggggagctcgatataaccggctacccgaaagagggactcaaagaaggcgatctggctggagcaatcagcattattattccagctggctcctatatcgaagatcagcagcagacgctttttgtgacggtgtgtttctatgctattctcattgccttgattgcggtaaccatgtttgccgtgatcagtcgggttgtgaccaagcctctcgaaaaactcgctttggcggcgaccgatatgagcgatgggaaacttgatgtttcccttgactcgataagagcccaaggagagatcggtgatttgacgatgcgattcgcgtcgatggctcggcagctcgaggaggcatatacgggtctggaggagaaagttgccgataaaaccgaggagatccagcatgcaaacaaaatactcgaacagcagcgtaagcagctggagttgagcaatgaactgcttcagcaggcaaacaagcagcttgttatcgacaatcaatacaaagacgattttcttgcagtgatgagccacgaattgagaaccccgcttacggctatcctgacgtttatagaggtgctcgagcatgagagaccgaagtcggcaaaggagaaggatgctctgcgcgaactgaagagcaatacggttgtgctcttgaacatgatcaacgatacgctggagatggcggccatacaatcagggcatggaggccttgtggttgacgaaatcgatcttatggatatcgtcaactacgtgcacgattcggtatcctccctggcgaatcgtaaaaacattgccgttaggagttctgtcgatcgaaacgttccgataatcatgggagactgggagcggcttcgtcatgtgcttgagaacctcttgaccaatgctatcaagtttacggatgagggaggagaagtcgatatttcggtatcctttgacgagcagggcgagatggtgattgtaagagttcgcgactcgggcatagggataaaaagcgaagatctgccgcgcgtgttcgagcggtttacgcagatcgagaattcgacaactcggggatacaacggcagcgggctggggctgagcgtcgttaaggaaattgtggagatgcatgggggaagcgtgttcgtcaaaagcgagccaggggtggggtccgagttcggattctccattcccgttgttgctgaaggctgcgaaagggggaacattgatgagtgagctcgtgctggtcgtcgatgacgagaagtcgattgtgagcggcatcacgagtcttctcgaggaggagggctatgagttctgctcggctggcgatgggatcgaggcgctggacgttttcaatgcgcagcaccctgatatcgtgattctcgatatcatgatgccgcgaatgaacggattccaggtatgtacggagattcgggctttggataagagaactcccatacttatgctttcggcaaaaggggacatcgtcgacaaaagcgtcgggttcaaggcgggtgccgacgactatcttacgaagcctttcgtcaaagaggagctgatgttgcgcatagaggccttgctgcgaagaagcagggatgccgattcccatccaaggggtggaaaggcggtcatacacgttggcggcttggagatccatctcaaacgccaacgcgtattactcgaaggggagccggttgatcttaccccgaaagagtttcttattctgtctttgatggccaacagactcggtcaggtttttacgactcaggagatcatcgaacatgtatggggcgaggattatgtgggcgagataacgagtgttgccgtgtttatccggaggatcagggagaaaatcgaggacgatccttcgaagccggtgtatctcacaacggtttggcgtgttggctatcgtctgagcgacccccatcgagaagacggggaaaggcaattcggggcgcatgggagccagcggtgagccgctcttttccttccaggttcgaaggcgcgttcgctccgcctgagcttgcagcccggctacggttttacgatggggcgtacgatgatttcatcaggcagctcgaagcaagggggattctcttcgcggatcgctttgaggatgcggatgagatcgcccggttgcgcagtcgactgatggaaagcggaatcgaaggctggtaccggggggcgagtttgaggagagggtgcatttctcctgcgtgccgtgattgcgtaaccgctttgaggagcaagacattcgagctgactacacaatgccatcggaaatgctttttctgcttgaactccgaggcgatgggtgcttccgacctcggaagttcatggcgtgacgacatggacgacctttgcgtccgcggtattcagctcgatcacgtcggactgtcgggcggtgagcctctcctgcttaagcaggaggcgttcgagtttttcgagcacgcaagagaacggtttccccgagcatggctccgtttgtatacgagtggcgacctcctttccgacggcgatctcgaacgcttcggtgcatgcggactcgatgagatacggtttagcttcaagcaagaggattcttctgagatcgggaaacgcctgtttagcagggtggccgaagcaaaacggcacctctcgtttgttgcggttgagatgcccgtcttccccggaagctttccatatatgcgagatctcatggaaacccttgctgggcttggtgttgattcgatcaacctgttggaattctgctttcccttggcgaattggggcgagtttgccaagcggggatttcggatagcgaatcctcctttcgatgtgctctatcggtacgactatgccgggggtcttcctgttgcaggaagcgagctcgagtgtcttcggctgctggatttcgcgcaagaatccgatctgggcatgggggttcactactgttcgctcgaaaacaagcatcgggctgagatgttctctctcaacgcggcatccacatggctttcggacgcctatattttcgatgagggtgattttttccttaaaacctgtaagattttcggggatgaggttctgcgggcacgatatttgcttgatggaatcgatgccgcctgcatcgaacatgaggctgctggttttatcgagtgccatcccgactgcaagcaaatgcttgacaaagagggaatccatgctgttatttcgtataacgttttggaacagcgcgacggacgggcggttttgagggagcttgccctgagatagaccgatgcggcggtgtcgcctgcgttggtccaggctatcttgcatcagcttgttgcatgacctcgcgtaacgaacaagcggtttcgagaacaaatccaggcatcacctcattctcgggtatcttttcggcttcgccatttgcgccaattttcttcccaatagcctcttgacccccacgtaacgttatagtttatgctgcgttatgcaaggggcgagtggccgaaagcctgcaggcgcgttacttgcaaacacgctgtttgatagtggaaggaggtgctgcaatggcgaaacgatctggatctcgcggcgagcaaccaagaggttggagccgtggcgatacgccgagggcggcgaagcgcgatacgcgcgaaacggggaaacccgatggtttcgcaacgggccgagccgatagtcggaaagatggtcggaaaacgagctattcggttcacgcactcgccgagctttcgggggtgagcgtgcgaacgctgcaccactacgatgcgatcgggcttttgaacccgaaacgtgccgataacaactatcgtgtctacggagccgacgaggtcgatcggttgcagcagatccttctgtaccgggaggtcgggatgagcctgtctgaaatcgggcatgtgctcgatggcgatgcgttcgatgccgagcgcgcgctcgaagagcacctcgtccgccttgtggagcagcgcgagagaaccaacacgcttatcgcgagcgtcgagaagacgcttgcggctcagaaaggaataacgaagatggaagatggagagaagttcgagggtttcaagaagaagctcgtcgaggaaaacgaaaagcagtacggcagggaaatccgcgaggcgtacggagacgatgcggtggaagcgagcaacgcgaagctgatgggcatgaccgaagcgcagtaccaaagcgtgcaggataccgaaacggccatgaaggaagcgttgctggcgggcatggaggccagcgatcctgcgggggccgatgcgcagcgggccgccgagcttcatcggcaatggctctgcgcgttctggaaggatggaacgtatagcaaagatgcccataggggaatcaccgaaatgtacgttgccgacgatcgcttcaagaagtactacgaggccatcgcgcccggcgcggcggagtttcttcgcgatgccgtcgccgtgtactgctcgtaatcaagttcgatggccgctggatcggatcgcgccggtccggcggctttccgcttgccgtcccgatcgcctcgccgaacgggcgatgatcgcttccgagccgctttcggctctattccgcttcttcctgatcggataatttcagctgctcgatcgaggtggtgggaatcctgaagcacatgaggtacagaagccacatggctacgagcccgagcacgagccaaatgtaccagcgctgcacaaggaaggcgctgatgcccatgagcacgtaggatacggcgaggatgcgcactttgaccgaagcgggtatgccgccgttttccttgaagggcacgacgtattttcggtacacgccggtcgattgtatccaggcgtggcagcggggcgacgatttcgcgaacagaaacgttgccaacagcagaaacggcgtcgtcggcaatacggggacgaatacaccgatgaaaccggcgatgcaggcgatccatgcgcagacgaggagaaggtatcgcttcataggtccctttcgttggggcttatgcgggtctgtcgggacatcgagtatagcaaatgccccgtgaattctcatcggggaaaccccgcgaacggtttcatcctgttaaactcccatatatctggaaacatcggcagtcgcgcgatcgggtgaagtccgtatgcgcggccaagtcgttttcggcgcggcatttcggtgcggtgctgtttggagttgaagaggagtcgtgcgatgatcgacgagatacatgcgcaaaacgtcgcgttgatacgggaagcccatctcgtgcccgctcgaggtctgacggtgctgaccggcgaaaccggtgcgggcaaaaccgccttgctttcggcattgaagctcctctgcggcgagcgggccgatgcggcgtatgtgagggaggatgcggggtctctgctcgtcgagggcaggctgttctgcgacggcgatctcgatggggtggtcgtatcccgcaaggtcggatcggatgggcgctcgcgcgtttccatcaacggggcgatggcgagcgtgggcgagctggctgcccgggtcggttcgacggttgatctgtgcggccagcacgagcaccagcgacttctcaagcagcaaacccatgtgggaatgctcgatgcgtgggcgtccgagacggtcgaacccgcattgtcggcctatcgcgaggcgtttgcggcagctcaggccgccgcggaagagctcgcccgcatcgaagaggcgggacaagcttcatcggcgaagctcgatgaggcgcggttcgtgctcaagcgaatcgacgaggtcgacccgatggagggggaatacgaggagcttgtcggcgtgcttgcccgcgccgagcacgccgaggcgcttgcccgcgcggccgataccgcgcatgccgcgcttgcgggagagtcgggcgcgatcgatgcggtgaacgtcgccgcttccgcgctcgattccatgagcggcgtcgatgagcagttcggcgctcaggctgaaagcctgagggaggccgcatacgtgctcgaagacgttgcccgcgaagcgcttcgctaccgtgattcgatcgaatacgatcccgagacgctggcggaaaaccaagatcgtatgggcgctctgcaggggatcatgcgctcttacggcccccgtatcgaagatgtgatcgcgcgccgcagcgaggcggccgatctcgtgtcgctcgtcgacgattctgctgagcgcatccgcgtggctcgaaaggagcgggaccgagccgaagaagcgctcgcatcggcggccgaagcgcttgacgcggcacggcgcgaggcggctccgcgattcgccgaggcggtgtctcggcagatggcgcggctcgaaatgggcggtgcatccatagagtgcagcatcgagccgcttgcgcgcgatcagtggacgaaggcggggccgtctcggttcgagtttctcttcaggcctgccgagggcctgagcgcccgtccgcttgcccgcatcgcttcggggggcgaggtgagccgcgtcatgcttgccatcaaggttgttctgggggaaaccgacgaggtcgagacgcttgtgttcgacgaggtcgatgcgggtgtgggcggcgcgaccgccgtcgctttggcttcggtgctctccgatctcgcccgaacccatcaggtgatcgtcgttacccacctgccgcaggttgccgtggtgggcgagacgcactatctggtggctaagcgggaggaacccgcttcggctggcaaggggggggaggcgaagtcgacggaagccgcctttgcgcccgaaaccgtgcttgctttgctggaaggcgaggagcgcattgccgaggttgcccgcatgctttcgggcgacgcttcggaagcgtcgcttgcccacgcagccgagatgctcgcccgcgcggcccggtagcgcctgaatagcagatgttcgaaaacccgccttgctgcgccttctcgcgttcggcggcggtggcagttgcggttgttttgtgcaggagggcagctttgcccgtcgcggcagtgcggtcctgtcatctcggccttcgatttccagactcgattttccttgtgcatttgctcaaaacctgagttttcgagcgtacatttctcgaagtatgtaaggtaaaagattatatatacgttatgaactgataaaaagttcttgtcgcaggtcgcttcatgtattatgataccaatcagtgacgtaatgacttaccattagagacccgaaggagcatcatgaaagatagcgaccacgcatccgaatacagccctgattaccttatgctgagaatgcttgtcggcttcggcaataagctcggaaccatcgatcggatgacgttccgcgaattgaccggccgccagtgcacgctcatcgcatcgatcggtacgttcgacgagcccccgacgctcggacagcttgccgaatgcgaggggagctcgcaccagaacatcaagcaaatggcattgaaactgcaggaaaaaggctacgtgaagcttctttccgactcgagcgacgcgcgcaagattcgcgtgactgccacgaagaagggccatgagttctgcaaaaagcatcacgagaaggagcagaggttcctcgagatcttgttcgatggcatcggagacaaggaagttgcaaacgtttcgaaggtcatggacaagctcaacgagaatctcgataccatgatctgcaacggcctcgacctttaaaggctctttttcttgatcagctgatcaacgggcaccccgcgtgttttggatgcgttgggtgccctctgtgttgcgctgcataaaaaacgttgacagtatcgggtgaacgtgtgctatagtaccctcacaattgaatacctcaaaccgatgaggcgagagtcaagccatcatgagcactcacagagagcgggcgtagctgggattcccgtaggaagctggatggtaaatggttcgccgagggaaaggggaaagggctgtacgcagcctgagtatctggaccgtgagcctgcgttaagggcagaaaatgtgttggcattttcgtgagagggctcttttcagagtcaaaaaaggtggcaccgcaggtacaagacctgtccttttctcaaaggacaggtcttttttgttgctgcggcaccgcacatgccgatgaagccgtacgtcctgcgtgcgattttgtcgagcgagccgcctggtttgactgccgaaaacctcatccgagttcgtgccggccgaaacagaagtccggggacggacgaaaaccgcggggggacccgcaggaaaggactgaggaacatggcagatcagatcaagcgcgagattgcacctgaggcggcatcgggcaaggagaaggccgtgcgcaagcgcagccttgacgttgagcagaagaagggcttcgacatttcggcgctcatcctcgtagcggttctgctcgcagccggcgcggtgctcaagatgaccgtgggcagcttcgtaaacttcttcggcatgaagccgaacttcatcatcgcgatgtactgccttgcgatcctgctcgtcaggcccaacctcggacaggccgccatcatcggtttgatagccggcgcggtatgccagctgcttcccggcaccccctacatcaacttcatttcggaattcctcggggcggttgttatggcggcgctcgttcgcatcccgatgaaaatcggccgcgccaacctgcagaccatcgtgagcaccttcgtggcaaccgtcgtttcgggaggcgcattcaccgtgtgcctgttcttgttcctgggcgccgatgcgtcgagccttgtggcatacgtgccgatcgtgctgtgcactgcgctcatcaactgcgtgatcgttcaggcgctctacgtgccgctcgccaaggtgctcaagaaggaagcgccgaaaaaggccatcgcgtaggcgcatttcagtagtgagacggaaggaagtcgacatgaccgcggagtcgaagcccataatcgacgtgcagaacgtgagtttcacctacgatggcgcaagcaggccggcgctctcgtcggtcggcctcacggtacgcgaaggcgattttctggggataatcgggccttcgggagcggggaaatccacgcttatctacagcatgaacggaatcattccccattactgcaagggcgatttcttcggatcggtgctgcttggcggaaacgacacgttcgaaacgagccttaccgatctatcgcgcatcgcggcgacggtgttccaggacatcgatgcgcagatggtggcgtcgatggtggaagacgagattctgttcgggctcgagaacttcggcgtttcccgggccgagatagaaccgcgcatggcggaggcgctcgagagcgtggggatttccgatttgcgccatcgcgccatctcgtctctttcgggcggacagaagcagaaggtcgccgttgccgcggtgctggcgctcaagccgcgcgttctgctgctcgacgagccgacgggtgcgctcgaccccgcaagctcgcgccagatattcgagcttttgcgcgaactgaacgagagctgcgggatcacggttgtggtggtcgagcagaagatcggcctgcttgccgaattcactcggcatcttgcggtgttgagcgacggggcggtgcgctactgcggcgagacgcgttcggtgctgcgcaatgccgccgagctgctcgccatcggagtgaacgtcccacgcgtgaccacgctctcgctgctgcttcatgaagggggctatgcggtcgatcggttcgcggttaacgtggaggaagcgaaatcgctgatcgaagggatcgtcgcatgaaaacggtgcttgaattccagggtgtaagctacgcctacgaggcccaagccgatggcaatgcggttgtgtcggatctctcgttttcggttcgcaaaggcgaattcgttgctttgatcggcagcaacggcgcgggaaaaaccacaacctcgaagctcatgaacggccttctgaagccgactgcgggaacggtgctggttgaaggcgtgccgacgaccgatcttaaaacaagcgtcgtcgcgcgcaaagtcggcatgcttttccaagaccccgatcgtcagatttgccagaacacggtatccgacgagctggccttcggattgggcttgcgcgacgtgcccgaggaggaaatcgaacgacgcgtcggcgaggtgctgtcggatttcgggttcgacggccagtcggcaccgttcatgctttcgcgaggagagcgccagttgcttgcgctcgcctcggtcgtggtgtgcgaacccgaggtcctcatcctcgacgagcccacgacggggctcgactaccgcgagtgcatgcatatcatggaccgcatcaagaaactcaatggcgcgggaacgaccgtcgtcatggtatcgcacgatatggaactcgtgctcgacttcgccgatcgcgtgatcgccatgggcggcggccgactcgttgccgacggagctcccgaagcggtgtttcgcgacggggccgtcatggggcaggcatcgcttatgcccccgcagatcatcgagctctccttgcggctttcgtcatcgcgcttcggcggcctgttcgatcgggctgcaacgccgtctgcgattctcgaggctttgcggacggctggtttcgagggaaggaaggtgtcgtaatggcgggattgctcgattactccgcaggctcatcggtgttgcacaggctgaatccggttgcgaagatcgcacttgcgctgggcgtgtgcatcgctgcgtttctaagcgatagcttcgtgtacctgctcgtccttttggcgttcaacgtgtgcatcgggttggtcggcggcattcggcgaaagacgttctcgcttctgtttggcttggtgaagatctgcgcattccttttcgtgctgcaggttctgttcatccgtgcgggaacgccggtgttcctcttcgtgaccgacgaagggctgcgcatcgccgcgcttgtggttttacgcctgatcgatgccaccatgccgcttgcgctcatgctcgccctgacgcagatgagcgatttgtccaacgcacttgtgaaggtgctgcatgtgccgtacaagtacgcgttcacggttacgactgcactcaagttcatccctgtttttaccgacgagatgtcttcgatcatcgaggcccaaacggcgcgcggcgtggatttcgatacgaagaacccggtcagaaaactcaggctcgtacttcccctgtgtgctccgttgctcatcacatcggtcgggcggacggaacaagctgcgatggcggccgaggtgcgcgggttttaccttcgcgacaggatgtcgggcagcaaagattatccgttcggtctgatcgatggcggggcgctcgcgatcatcatagcgcttatcgtgctcgccgtgctggtgtaggggcgcgccctgcgagcacgcgaagcggattgcgtgcggttcgtcgcggacgtgcgaagtgcgcgtctctttggtagagtggttgcgatcgcaaaagaaagagagtgcgcatgctgaccatcggatgccatctgtcgagctcgaagggctaccttgccatggcgaaggacgccgtatcgatcgacgcgaacacgtttcagttcttcacgcgcaatccgcgcgggggcaaggcgaaggccatcgacgccgctgatgtggcggcgttctacgcatatgccgaaagccagggcatcgtgcagatcctcgcgcatgcaccctatacgctcaaccccgctgccgccgacgaccgcgtgcgggagttcgccctcatgacgttcaaagacgatttggcccgcatggaaaacactcctcatcagatgtacaatttccatcccggcagccatgtgaagcaggggatggatgtcggggtggagaaaaccgccaacgtgctgaacgaggttctcaacagcagtcagacgaccaccgtgctgcttgaaacgatgtcgggaaaggggaccgaagtgggcggtcggttcgaggagcttgcggatatcatggggctcgtggagctttcagatcggcttggcgtatgcctcgacacctgccatgtatgggatgcgggctacgacatcgcaggcgatctcgatggcgttctcgatgagttcgaccgggttgtcggcatcgatcgcctgagggccatccatctcaatgattcgctcaacccctgcggctcccgcaaagatcggcatgctacgatcggggcgggcgagatcggcttcgacgcgctcgttgcggtgatgaaccacccgttgttgtgcgagctgccgttttttctggaaacacccaacgatcttgaggggcatggcaaggagatcgcgcagctgcgggcggcgtatacgcactgagccggctgttccgatgcgtccgatcttgtgagagaatgaagcaatggaatccgaaaccgtccgataggcatacatggcagcgcatatactcatcatcgaagacgacgccgatatcaacgaggtcatggccacccatctgagccgcaacgcctgcacctgcacgcaggcttattcgggaagcgaagcccgcatgctgctcgaatcgtcgcagcggagcggtttggcgtacgatctggtgatcaccgatctgatgcttcccggcatccgaggcgagaagctcgtcgaactcattcgcggttacggcgatgttcccgtcatcgtcgtctcggcgcttggcgagcctgcgggcaaggccgagcttttgcgctgcggcgccgatgactacctggtgaagccgttcgatctcgacgagctgctcgcccgcgttaccgtgcagctgcgtcacgccgcgcgggcggaaggacgctcggcgatttcgggatcgcagggaaaagccgagggcgacggccggctgagatacaaggattgggtcatcgattcctccgcccgcacgttcagggttgcgggcgagccgataaagcttacgcgtatcgaatacaacatcgtggaagctctcgtccgccgcccgaaaaaagtgttcaccaagcaggagctattcgaagtggcgtggaacgaggaatgcttcatcgaggagaaggcgatcaacgtgcatgtcagtaacattcgcggcaaattgaagccctccggaaccgattcgtatatcgaaacggtatggggcatcggattcaagcttgcggaatgactcgatggattcatcccgcttgcagcgattcgaaccatctttaatctttcttaacggtttcaaggcgattgctgaaaccccctttcgtatcgtggatgcataccgaaacgaaaagcgatggaaaggagcggattgtgaacgtaattgaaacctacgggctcgaaaaatcctacggcggcaaacgcgccgtcgatcatttcgatatgcacgtggcaaaaggcgatatctacggattcgtcggcctcaacggcgccggcaaatcgacggtcatgaaaatgctggcaggattgtcgaagccgacgggaggcgatatcaggctgtttggcgaagacgccgacggcgaggcgattcgtcgcatgggggtgctcatcgaggcgcctggcctgtacggcggcatgacggcttacgacaacatgatgctgaaggcgctctgcctgggccttgtcgagccgaagcgcaaggtggacgaactgctggggttcgtcggcctcggaggcgtcggcaagaagaagaccaagcagttctcgatgggcatgaagcagcgcctcgggctcggtctcgcgcttttgggcgatcccgacctgctgctgctcgacgagccgctcaacgggcttgatcccgagggcgcccgtggaatccgcgagctcatcgttcgcctgaacggcgagcggggcatcacggtcgtcatcagctcccacgtgctcgaacagctcgggcgcatggcgacgcgctacggcgttattcgcaacgggcggatggtccgcgagctcactgcggcggaggtcgatcaggaatgcagcgattgcctgcagctttcagcggccgacccgacgcgttcgctcgccttgctgcaagagcgtttcccgcaggcgcggttccaggtcatgcccgacaattccatcagggtcttcggcatcgccgatgcggccgttatcggcagtgcgctcaacgatgccggaatcgccgttcaggggctctatgcccatagacgcgatctcgaagaatttttcgttggcttgatgggagatgagtaccgtggctaatatcttgagaatggatttctaccgtgccgttcgcagcaaatcgttgtggatactgctcggctctctggtcgtcctcggcatcgtagccatgggatcgctcaattacatgctctcccccgaattcatggagacgatgcagaatgccggcaacgtggcatcgggttcgggttttcgattcggcataacgacgcccggcggcgaccaggtcgatatgaacgagatcagccagagcatcgcgcaggctcagtatgcggtttcgggtcttactcccatggcccttgtcggcaacatcttcatgaacgggggagggctggcgtgtttgttcgtggtgttcatcgccgtcttcttcgcagccgagttcgagaacgggttcagcaagaacgtgttcaccgcctccccgagccgtacggtctttcttgttgcgcgggttgtcgagacggtgctgctcgctgtggtgttcacgcttgttaccgtgggggcgacgcttgcaggtgcggctgtcttcgggatagaaatgcaggccgcccccgcgggggatatggccctgtggtttgcgctggtggtgcttgtgctgtcgggtatgggaatgctcacggccctgttcgtttggctgacgcgcaagatggccgcgggcatcgccgtcggcatcgtcgtcggaagcggtcttgtcgttgcccttgtcgaagccgttctttcgctcttcccgagcgttgcggatctgggtgatttcacgctgtacggctgcatgcgctcgctcggatacggcataggcgtcgatggcggcttgagcagcgtgcacattgcggcagtgtgcctcgtgttcttggccggttatgcggttttgagcctgctcatccttaagaagaaggatatctagatcatggaatccctggtagcgatcgttgtcatcctcgctgttgcggttgccgtgctctgcgtgcagctcgttcgctccgagcgagagctgcgcgcactcgctcggtacctgagccagcgggattcgtcgagcaacacgagagtcaccgtgtcgatgcactcgcgcggtttcgttcggcttggacaggcgatcaaccgtcagctcgatcgccatcagggagaacgcgccgctgccgaagagcatgcaagcgagatgcgcagggggctgacgtatctttcgcacgatatcagaacgccccttgcgggagcgaagggatatgcgcagctgcttgaggcggaaaccgatccagcggttcagaggcgctaccttacggcgatcgggcggcgcatcgacgatgcatcgaagctgctcgatcagctcttcgcgtatgcgcaggtgcaggatcccgattaccgcctcgagcgcggcccggtcgaggcgaatgcggttttggccgaaacgcttcttgcgctgtatccgcagttccaggaaaagggatgggctccgcgaatcgagcttgagagcgatcggttcgttgtgttggctgacggcgaagcgctcgtccgggtgtttcgcaacctcgccgcaaacgcgttgcgctatggggcggatgcgccgacgatcgagcaacgcgcttcgacgatttcgttctcgaaccgcgttgcgcaacccgagatgatcgacccggcgcgattgttcgagcggttctatcagggaagcgattcgcgctcggatggcaacgggggcttgggccttgccatcgtctcgctgctttgccacgcgatgggcgcgtcagtcgaggccgagcttgtcggcgacatgctgacgattgccattgggttcgaagaggcgaccgggacgcggtaagcgagtttcaacgaccccgaatgactaaggattgcacttgctgcaggccccgtatccgcgggcgattgcatccgatttggatatgggtatcttgcttttcttgagatatcggcatccgtcggcgtggtatttttctcccgtttcggttatatagacggtgtagcccccgttgtcgggcgcgctggccgcagcggctgcggccgccgcttcggcttccgccgcagctttggcttccgcttcggcggcttcttccgctgcagccgcttcttccgcggcttgtttttccgcagcctccttttcggcctggatacgtgccatcgcctcggtgtctttcttcagggatagcttgaccgtatggcttttcttcagatcgaatacgtacgagaccggatcggatgcgtagatcgtcgcgtcgtcggacagggccgccgcatcgatcgcaaacgtgtaggatccatcttggaagtcgagttcgtacacttttcccggttttgcgtcatggagctcggataagcccttgctcgctccttccgtgcacgttatgagcacgggaaccgttttgcccgattcccattcgctcgcagaaacggagaaggagagtacggcggcttcctccttctcggcggccccgttctgctcggcgcgttgcggggattctgctacggtggttgacggattgctggaatcgggtgcagctggcggagatcccgctccgaaagcaacggaaacgccgaggaagagcgataacaccgacagggctatcgaggctttcggggccttgatgcctatctgagtgtttttcgataggaggaacaacgctatcgaagcaatgccgcagagcacccctaagggggcgagcggctttatgcagcacaggacaattgcgacgagggccaagacgagcggcagcattggaggcgttttcctcgtctgccgattcgccttcgggagctctacgaaagaaaaaggcgtgttgccgggggaagcttcggcggcctgcctccctttcgccggttcgcggtccgctacgcgatagggggttgatgggccgatgtcggaagcggattcgggtttctttttggcgggctcttcggcatggcgttctttttcgccagcggcttcaaggtaggcgagtcctgcctcggtgagcttcagcttgccaagggaggggcggtcgatcaggccccgtccgtagagttcagattgggatttcttgaagcggttttcaaaaagcgctgtactgctgtgcccgatcttgtacgccttctcggctctgctgagcccaagggcggttgctacctctttttcaacagcggagcttgatcgcggtcgaccgctcttcaaggcttcgatgatcgcttttcctatggtctcttcatcgggaatggtttttctcgtgataggtttttcgtccatcgatgtcctttcgccggctgaggcgcgatatgctcttacgtactcagatgttcagttaaatcccctgatgagctaattgtatcaaactataagtaaaacgataaacattaattggcatgaggggagacccgtcgagtgcgcgaacccgatcgacgggcgctgccgtgttttgggcggtctcccgggggctgtggggtttcaggaatgcaacaggaggcgaaaaagcgacgatgacggtcgtttcgggcgtatacttcagatcttgcaatgcaagataaacgaattggcaaggatccgatgcagatggcaaaccaggaagcagcgcaggttggttcgagcgagcctcatggcgcgacaggaaagaaacggcacgtagctcggtgggtggcgggtgcgctggcggtgatcgtgctggtgtgcgccgtgggattcgccgtttacgtaaacgactactaccgtgcctcttcgggaaacgaggtttacctggcatcgaccaccgatctcgaggtgcaccgatccgaagggatcgtcgctttcggcaaccctgatgcatcggtgggcgtcatcgtctatccgggtgccaaggtcgcatacgacgcctatgcgcctctcgcccgggagcttgcggagcgcggggtgttctgcgccgtcatcgaggttccgttcaacatagcattcttcgactccaacgccgcgtcacgtgtgattgagctgtatccggatatcgaaacatggtatgtggcgggccattcgctcgggggcgttgtggcatcggggtgggctgccgatcatgtcgatgagctaagcggcgtggtactgctcgcctcgtattcaaccgccgatctttcccagagcggcttgtcggtgctctcgctttacgggagcgaggacgaggtgctcaaccgcgatgcttacgaagatgcgctttcaaacctgccgagcgattttgaagagggagttatcgtcggcggcaaccatgcgcagttcggcaactacggcgagcaggcgggcgacggcgcagcggcgatctccccgagagaccagtgggaagagaccgccgacgccatcgcgagctttgcgggcatagcgggctaggcgggctaagcgggttatgccggttaagtggacgcggcgatcgttcgactgcgttgcgatgcgacgctgatgccgcacgttggctttcttgggattgcatgcagcctgcgcttgtcgacacgcccttgcgtgcacgccaaaatcgaaaatttggcaaaactcgccttttcacgcgcgggggattgcctgcacttgcgatgcgtctggctcgtggctcggcgcgacggttggatcttttccgcatggattagcctgttgcagccgtcaatggttttcaccctttatccgcacctgcgctatactgagtactgcgaagataaaaacacgatccggccggtagtccggatgcggagtcgataagccgccgcccttcgatgaacaagttcgaaccaggcgagcagatcgacccgtcagtaacctgcctccttggttgtcccttcttcgcgcggtacaacgacataggaggattcatgcaggtcaattcatcatcgacattgacgatacttcacgacggccaattttgggttggaatttgcgaacatgaagacggcggcgcgtacgaggcgcgccgcatcgtgttcggaccccatgagccgactgacgaggtcgttctcgcatttgtgtgcgagcaatggggcaagctgggattcggcgcgaacatgcgcccctctctttccgatgacagggaggcgagggggacggagctgttaaatcgtccaacgaagatcaatcctaagcggatgcagcgaacgatacaccgcgcaatcgagcgacgcggcgtcagcacgaaagcccaacaggccatacgcgatggatacgaggcgggcaaatccgatcgaaggaagcaaggacgagaggagcggcttctcgctgaggagcgccgctacgagttcagacggcaaaagcgcaaagagaagaagcgcgggcactgagagctgcattggcttgcttgcgcagtggcgtcgggcttcgatcgcgtgcgagcagcggcgttaaaacagtcccatctgattcggctctcttttcttgtatgcatcgatgatatcgggcatgcggtaaagcagacctgcctccttgcagagcttccgcagcagggcaagagcttcgcgctttcgcggggagttgcacaggtagcgatccccgaattcctcacggtagcgttggggcaggctgggtgagacggccttgaggtggtcaaggaagtattccttctgtcccgtcctcatggttacgcctcccatgctgtatatgaaccgcgctcctgcctgatgcgcggcctccaccatcgattcgatcgaagcgtcgtcatcggtgatgtgcggcagcaagggtgtgaagaggatgccgcagaacaggttggcgtcggctagctcgcgtagggcggcaagccgcctcgagggagatggcgcgcccggttcgatgatgctcgcaagcgcgtcgtcggttgtcgtgacggtgagtttgacgattgccgagtgttgctgacttatgcgctgcagcacatcgatgtcgcgcgtgacgagcgctcctttcgtgtcaatcgatacgccgaatccgtattggtcgatgagctgaagcgccccgcgtgttatctcgagctcccgctcgaacgggttgtacgtatcggacatggcgccgatgcccacgacacccttgtttcgtcgggagcgcagctctcgattgaggatggcgagcgcgtcgaacttgacgcgtacttcatcgaacttatcgatgcggtagcaatcgctgcggctatcgcagtagatgcagccgtggcagcatcctttgtacaggttcatgttgtaatcgatgccgaaccactgcgcgttgtcgtagcggactttctggaggatcgattttgctttgattgttttcatgcgcccatcatagcagggcaaagcggacagggtgcgtccgctttgccctgctgcttcacttccgctgttttggaaagaattcgaacggcttgttttcgagcgactgtgcttcgatgaccttggagagaatccttccgaagttcggagcggttttctctgtgattgccaggtgcccgatcctctcctcagatgctttccgcacgatgccgacgacctcgccgccggccttcgcgacctcgcgatgcgcggggcgcgtttcggaatcagttgaccgggtgattccggcagtcgtcgtttctgcgagcgttgtgagggcaggctccatatcgcccgtgttgtcgcgtaggctttccttggtgaggcccttgaaatcccggtattcgcgtgccgacatttccgaccaagcacgataaatgtcgttggtgagtatggcgtattcgaagtcgcgtgccgttccacggacttcctcttcgcgtgcaaaggtgcctggcgcgtgcgcggggcaaagccgttggcttatccactcttcggtatagcctttttggcggtagtatccgatcgccctttctatggcgagttcgggatcgaacgtctcatcgatgcgctctttgcctgcttcggcaagccaaagcttgaaaggctccgccttgggcgaggggattatctgcgcgagccgcagaatctgctcggttgtgccgacgtcggtaatgcgcattttgccgtcgggggccttcatcttcaaaccgttacaatttgtaacggtttgatttccctcgtcgaaaagccttttcttcagtactctccaatatgcttgcgggtttttgctttctgtcagaaccgcgatgacgtcgacgatggaaaaataccaatcctcatcttcagcgctccagagcgatctgatttcgcaaccttcgaaaagctgcatttcgttgcggagcgttctttctgcttcggtttggtgcacggtgcgtgcgcgatcgacctcggtttggtgcatagcttcgccatcctttccttcgaaagccttgatagtgcattggtttggattggcggactggatgggatgccaaaacagcgtagggcgccggcctgaattcggaaaggcatgtccgcttcgatgagtcgattataccgaacaaacgttcttataacaagaggggttcgagaacttttcagccgtattgcataaaaggccggcctggcgagccgaccctatgcaaatcttccaggctgattctgcgccgattgtgcgggatcagcctgtaccgggtgaatcgtcggcgaactgcgcgttatgccggacgaatcaccatttcctggatgaggctgttatcgagagcgcagctgccgtcgttgcagttctcgattgttgcaaccgcatggacgacaacaccgttgtagtcggcgtagaaattgacggtgcgttcgtcgatgatgcgcggatcgagcatcgaaaacccgctcaggacgaactggttgtgatagaacatgtcgatcgctcgttttccgtaggtgtagaagttctcgaggccgataagctgcgggcagtaatcgaacaggcgacaggtttcggtgaagcactccgagagcgccttgtgatctttgttctgcatggattcgacgaaagcttgaatgatcatcggggcctcctagtagactttctcggaatgcaagagcgcatcggtgccgccgtcgacgaagagcacgacgccgttaacgccgcgtgcttcgggcgaggacagaaaggcgatcgcgtttgcgatttcggcgggatccataagcggatcgccgccgtagttggtgggaacgggcagcgcccgcacggcaacgagcatctcgtcggtaagctggtcggtcatggcggtgcgcacgttgccgggcgcaacggcgttcacccggacgccgcgtgcgccccaatcggcgctcatgcggcgggcccagcgggcaagcgcatatttcgtggccgcgtagaatgcatgggcgctcgcggggtcgtagtttttgacgagctcgaggatgcggtcctcgtcggcttggttgttgagcatgccgacgacgtccatgcgcgcagctccctgcgcgatggtgttggacgagatgaccacgcagttgccgcccttcttctcaagcaggtcgcgcacgccgatcgccatttcggttgccccgaagtagttgagcgagatgatgagcggaatgctgccgttggctgctgagacgccggcgttgcatatgatcgcatcgatgccctcgggatatcgttcgtgtagctcggctatcgcagctgcgcgtccttctttggaggcgaggttcgcgtcgatatcgccgcccttgaggtcgatgttcacaacttcgtgtccatgctccttcaatatcgaagcagttttagcaccgatgccgctgctggctccggtgatcacgtagatacccatcggcaaatccttatctcgttgatccgttcgcatccatgggatgcatcgtaaaagcctgcgcatcataccacggccgcgagcaggctttgttttcgatctgctaacgacgggcgagcagcccgtgttggtcgggggtcggtaagctctcccgtatcggtttctaattgacaaacaaatgttcgtatagtagtatggcgcgaacgaacgagggcgtcacggccggctgccgaggagccggccgtgcgggtgctggttgcgagagggcggcccaggcggctgccgaagggcgcgcaggcggctgcatgcaaagcctgcggcctggtcgcacgttgcgaaggcgcggcttgcgaaggtcgccggaataaaggaggcgttatggcatcaagccgagaattcgtcgattgcgtgtgcgaccggctggcgtctgcggggcatatccacgcacgcaaaatgttcggcgagtacggcatttactgcgaggggaagtacttcgggcttgtatgcgacgatcgctttctggtgaaaatcaccgaggggggagagcggcttatgcccgattgtccgcgcggtataccctatgaaggcgctcgcgaggcgtttttgatcgaagatctcgaagatgcggaattcctcgcccagcttgtgcgcatcacgtgcgccgagttgcccgagccgaaaccgaggaagagaaaggcacgtccatgagggacgtcgagcaaaccatcgggaatctgatagacagccagaacgcgtcgtttctcggctcggttggcgaagacgggtttccgggcgtcaaagccatgctgcccccgcgcaagcgggaaggcatccgcacgttctacttcaccaccaacacctcgtcgcgacgcgtcgccgattatcggcgcgaccccaaggcgtgcgtgtacttcgccgatcgtcggttctttcggggagtcatgcttcagggaaccatggagatcctcgaagatgcctcctcgaaagagatgatctgggaagagggggatacgctttactaccctctcggggtcgccgatcccgactactgcgtacttcggttcatcgccctgcgcggccgcttctatcgggatttctcgtcggaagatttcgccgtcgccgagtagggctgtggcggattttcgcacccaccgcgccgtcagcgctttttcttcgcgttccgcccgttaaaacaggcttgcctgctcttgctcgacatggttttggcttgccctgatgatgtcgtccatgcgatagagcatgccggctttttcgcaacgcgctctgagcagatcgaggatgtcgttcagttcgaggctgtaacagaaatacgatgtcccgtaggtgttgctgaagcgctttgcgagtttgggggacatggctttcagcttgcgcatgaagtattccttctgcccatcgcggatggagatgccgccgagcgtgtagatgaaccgcgcgccgttttcgtgggcgagctcgacgatctcctcgatgttttcgcgcgtatcggtgacgaagggaatgagaggcgtgagcatgacgcccgtgaacagtccgcagctgctcacctccttcatggccgcgaagcgttcgctcggagcgggcgcgcaaggctcgagcgttcgtgccagatcgtcgtctgcggtggtaatggtgaaccgtatgtttgccgagcgcgcccgggcaacccgcgtgagcacgtcgatgtcgcgggtgacgagggggcttttcgtattgatgtcggccccgaagcggcagtctgcgatgatttcaagtgcacgccttgtcagcccgagctcttcttcgcaggggttgtagcaatcggagacgaccccggtgctgatgacccctgccgctctcttcgcatgaagggatttggcaagcaggatgtcggtgtcttccttagcctgcacctcgttgaaattcttgatgccgtagcagttgctgcggttgtcgcaatagatgcaaccatggggggcagcccctgtacaggtttatgatgtagtcgattccgaaccattcggaaggctcgtagcgagacctctggaggatggttttcgcgggaatcatccgaaccatgtacttcgctccttttcggtcgatgctgcgttgcgtcgcagcgtacataagtaattaccgaaatagtatagcgaagcgcatccgcatacctgtgggcatcgtgaggattcggaatggcgaagttgcgcgcggcttttctcaagcgcggcgcacggggtgccgaagtaccgttctcatgttctccggctttgatttgcgcgggtcgccgaggtagatctcgtggtgcctccgcgcaacggggaacggttcctgcgcatccgagatctcgttttcgaaaccctgctcttcgacgaaccgttcaagcagcgcgatggaggcgggttcgtcgtcataagggcctttgtgcattatctgggcgcacagcccttcttcgtagatttcgaatcgggcgggcgaggggtcgatttccggtttcttccgagcgacttgcgcgacggcccattcgaacacctccgaggtgacgaattcgggttgccttatcatcgcgatccaggagaacgcgcttttgtccttcactgcgatgccgtcgaaaggagcgccttcgttccaccacagcccttcgagtggaggaaccacgtagtcgaagtatccctcgggctggtcgcctgacatcttcgacatcttgatggtgaatgcgagggcgtacaggataccgacggcgcgctgatactgtccgcccccctcgttgggatcgcctttgccggcgaccataatgaaccccatggccggcacgtcgacgattgagggtttggtttttgggaggtacagatcgcggtactcctttttaaagtcgaacttcgcctctgccatgggattcctttcgattcgtcttgtcggcgactatgccttgattgctatgtagagatcgatatcggtatcgttttggtcctccgagggcgggtacgcctcgaagtcgacagtccaggctcgctttgccgtcagatcctccatggcccagatttcgtcccatgctttgataaccgtgttgacgcaatcgccgtggacggtgaacttagcataagttcccgccgggatcacaagctcttccatttcctcgggcagcgcaccctgcgcgctttcgcatccgaccatcatggcgtaggactcgtccgccatgtcgtaatcgtaatacaaaccatagcatgcatagggttcgaccgaagcgttcggcaccgattcggccatgccgtcgctcatgaacgattgccacactccgccgatcttttcggcgcagtcgggggcgctgttggaggtgcggatggtcggcccgacgatgcggcgctcgggaagttcgacgatggtgtattccatgtttttcctttcgattgtgattgtcttagccagaataccgagcattagaggacagggcatgtcctctaatcgcaaagaattgaaaattcgatgggatggggttcttcgaaccggctttcagagctatcggtatgtatcggccacctgttgcgcctgttcgcgtagccagttgcgcaggtcggccggctcgatcgcctcgagatgcgatccgaatgacaagaggtagaaacgggtgcgctcgtcgagggagcacgtgagcgttacctcgagccttccatcgtcgaggtatccgatcatgtcgggcgcaaactcttcgcgcacccgttctttcgacgaagcgtcgaagcgcagcacgagtttgtcgggtccgtgggggcggcttcccgattcgccaagcgattcgggaagggctcgcatggcgaactgctcggaaagcatctccatctcctcccatcggatgcgaaacagcttgaacgtgcgccatgcctgcctttcgaggcaaaacgctctcacgtaccagcatgattccttgaatacgaggcgtgccggctccacggtgcgtaccgatgcgttgcccgcggcgtcgtagtaggggaaccgcagcagatgccgtgtgcatatcgcgcgccggatgatgtcgaaggcgtgtttgtactccgggggagcgccccagaacgagaagtccatatcgagccagtcgacgggttcgcgctgaaatacgcgcgcgagcttgtcgcgcaccgcgtcgtcgtcgacggcgccggttctgccgagcgccgaaagcgctgcgaggatctcttcctgctccgattccgatacgagcgatttgttgagcacgtaattatcgagcaggtggactccgccgcctttccccctggtcatgtaaacaggaattcccgcacccgagagggcctcgacatcgcgcctgatcgtacgggctgaaacttcgagttcgcgcgcgagctcttcggtggtcatccgccgtctttccatcaggaggtagactatttcgaagaggcgccccgtctgcatgtcgctacctgttcgtttcggtacggcgcgtcgggtcgatgcgccgcaggctcgcatcgagatcgtctgctgggcggcgcgtctgcgggttcgcttcgggggcgcctgtttgggggggagttcgcaggaccgcttcgacgagatgcccgtcgagctgagaggctgcgacaagggggctcggctcgcctgcgaaatctccgatctgcttttggtaccacgcaacgtcgtgccaggctccgcatttgaatcccgcttgccgctgagtccccataagcgagaaacccagggagcaatgcaggccgacacttgcttcattgggtattgtgatcaggctgaatacgttgcggacaccctgggctgccagcagatcgataaccgattcgcacagtctgcggcctatgcccgcaccctgttttttcggatcgaggtaaaccgacagctcggcattccacgcatacgccgcacgctcgccgatgcggtgggcgtaggcgtatcccgcgagctcgcctcctgcttcggcgacgatgtaggggtagcattccatggtatcgcgcattctctgctcgaattccgccttcgagggcgtctgggtttcgaacgtgacgggggaggcttcgacataaggggcgtagatggcgagaatgccttctgcgtcgtcgatgcgggcgggtctcaaaactatgcctccggctggcgcggtcatgcgggctccttgaaattgggaaagcgaaacgatatgcggttcgaacgaatcccatcctagcagaacgggctcgtggtaggcttggtgccatgtaaaataccgagtcgctgcgaacggttgcgacggggattgcttgcgaggaggcgtgtaatggaacggttgacggcaaagcgcgacgagggcggctacgaggtcgatgccgacttgatcgagtgcggcgaaggaacctgccgcggtcgggcgatcgatcgcctggcggcttacgaagacatgcaggagatgctggaagcccagtatgagaaaacagccgagcggctcgaagtgctcaaggcgcagggaaagctcaaaacggcgcaagcccagcagctgcttgcgcagaaactcacgtactcgaacatgctcggtctcataggggttcattccgattgatcggctgggatcggcccattcgatgaaagctcgatttatgtggagattcgaataatgcgtcttcgcggatcgggcttttttgtcacaataagacacgcgtccgatcgcatcggatcgggcagatcgtatccaaaaacgcgggcctgccgatcgacgggcctttaacttcggaatatcggtggaatgcggcatggctaaacagatctatgtgggacataaaccgcgatggtacgagagcctgcccgtatcgcctgccgtgcttgccgttgtgctcgccgtgcttgtgatcgggggaggggtttgggccctgtcgggtttgttcgcctcttcgggcgagcccgccgagcccgaagcggagttaggcgatgcaaccgaggcggttgtcgatatgccgccgacagagcattccgaccctgttttctccgcaacggcggtcgatgctgcgtcgggcgactacgagatcaacctcttctcggcgctcgacggcacttccgagatccttgaagaatctcaagcggccgaaatacaggaggccatcgaaaactttgcgacatccggataccaaaccggattcgtggtgctcgacctgcatacgggcaaaggcatcggctacaacgccgacgaggaattcttctgcgcgagcacgatcaaggcgccgttcgtgacgtttctgtggcaggagctcatcgatagcgggaaggccgatccggccgatcggcttgagaaggatatcgtgatcggcggcacgggcgttatggcctctgagaccaagcaggaatactcgctcgaggaggttatcgccgacaccatcgtatattcggataacaccggatacgccgtgctccgcgagaattacgaaggctcggattgggatgaatggacgattgccgcgggtattccccaggccgtaagcgccgagggctggtacccgttctgcagcgcgaaggacctggcccgttactggattgcgatcgattcctatctcgataccgaaagcgaaggcgcgacaagcgtcaagaaccttttcggcacgacggagatatcgtttctgcgaaccgccctcggttcgcattccgaggtgtacgccaaggcgggcttcgaggtcgattccgaaaacggcgatctgggtgcgatgaacgatgcgggcatcgtgtcgggaccttcaggcgattacctggtggccatcgtgtccaatgccgattacgacccggattggctggcggatacgtcttcgctcatcaccgatctcatcacggcgctcgattccgcccatacggatctgctcgccgaatagcgtcgcatttttcacagggtctgcgaatttcggctcgtaaccgaaaaacgccgtggacgaatccagatatattagtactatacgtatatatgaaagacagggatatatacgaagatggacagcgctttcgcggcggcagcgcgcgggccgattgcggcaattcccgttcccgccatacggtggagcgggtatcggtgtcgttcgggtcggggcgctcggcacccgggggcctcgaccgtgaagaggcgggcggtgcttcgcatgcggccggttcgcgggagcggaggccttctggccaggcttcgcgcgagcgccgtcgggcagatgcggttgcggtgcagggtgggaggggccgccggcccgagcgcggtgacggcttcggcggcgtcgatgcccgatcgcgccaaggatcttcgttcccccgaacttcgcgacggtcatccgagcgctctttggatcgcgattatcgcgaaaccgccccgctcggctacgttgggggcttcggtccgagaagcaggtcgtatggcatttcttttgtccgcgtcctcgttgcggcggcggtcgtctgttgcgtgatcgggggaggtacggcagcgctcggtgcgctgacctccggtttcgaccgcggtgacgcttccggggagacgtcgcatgccaccgttgcgatcaacggcgcttttgcgaaggcccttgaggaaaagccccatcttgcttttgattcgtcggatctagacgtcgtttcggacggaaacgggatcaccgtgttttcggcgctcaagggtacctcggagcctctgggcgaaggggattccgtcgccatcgaggatgcgttggcggcattcgccgactgcggataccatgcgggtttcgtggttcttgatttgagcacgggaaggggtctcagctataacgctcacaccgatttcttttcggcgagcaccataaaggcccccttcgtcgcatttctgtggcaggagttcatcgaagacggcgaaatcgagcttaccgatacccttgtgaaagatgcgtcatacggggggacgggcgttatggcttcggaagaagacaaggacgagtacgctctcgaggaagtgatcgccgacaccatcgtgtattcggacaacacgggttacgccatgctgcgcagccactacgcaggcgcaagctgggatgaatggacggcacgggcgggcgttccgcaggcggaaagcgattcgggctggtatctcaattactgcgcatgcgatctggctcgatattggctggcaatagattcgtatctcgaaaccgagagcgagggcgcacgaagcgtcaaagatctcctcgggtcgaccgaagtgtcgtttcttcgccaaacgctcggagccgaatgcagggtatacgcgaaggccggattcgaatccaacgattccgatagcggtctttcggcgcttaatgacgcggggatcgtcgagagcccgtcgggcgactaccttgtcgccgtcatgtcggatgccgattactccgatccctatctgacggagaacgcctacctcatcgtcgacctcatcaaagcactcgattcggcccacgccgatcttctttccgcgtagaagcccgcctgggcgcgtcggctatccgcgccgttcgcttcggccgcaagaagcccgcatgccgcaccagcagcgacttcgcgccgcacctgggcgtcttgcggccgctcttcgatgcgtctcgcataaaatcttttacacaaagcctggcgaaaagcttgcgatgggctatactaacgcgttacaacggaatacgtaaatgcaatgacgaagacggcatcgcggcaccatggcgccaccagagaagagcccctcggctgaaaaggctcgacggcatgcgcgatgattcactttaccagcagcggaattgaacggtcgggcttgtccggtgccagtaggtttcgccgggtgctcccgttatcgagcagacgagcgggcaaccccgatcgggcgcagtgtgcgaacctggtcgagcgggttgtcaaccgaggtggtaccgcgagagtcttatctcgtccttggatgcaaggatggataggactcttttttattgcccgcatgggttcggcgcccgacggcggttcgatgcgtgcggcatgaagacggaaaggcaggaacatggcactgacagaggagttggcggcgcttcgcaccgagacgcttgccgccatcgagcaagctgccgattctacggcactcgagcaggtgcgcatcggcgtgctcggtaaatcggggacgcttacggggtatctgcgctcgatgggcagcgtgcccaaggaggagcgcgcggccgtgggcaaagcggccaacgaggttcgcgtggcaatcgagggggcgcttgaggcgcgcaaggccgagctttcggctgcagaacttgcggcgaagatcgatgcgagtgcggttgacgtgactcttcccgggcgcgcgcagcaaatcggaacgcgtcatcttatcagcaggatcaccgatgaggttgccgagatattcctcggcatcggatacacggttgccacgggtcccgaggttgaaaccgattactacaacttcgaagcgttgaacgctccggcagatcatccctctcgcggcttggccgacacgttttacgtgcgcgatctttcgggcgacgttgccaccgtgcgcggagaatccgacgtgctccttcgcacccagacttcgggcgttcaggtgcacgccatggaagatcaggagcttcccatcttcgtcatcgcgccgggcaaggtgtatcgccgcgatgttgccgacccgagccatctgccccagttcacgcaggttgagggccttgtggtcgacaagggcatcacgttcggcgatctgaagggcacgctcgactatttctgcaagcagatgttcggccccgagcgcaaaacgcgtttccgcgcacattacttcccgtttaccgaaccttccgccgaagtcgatgtgagctgcggcatctgccacggagagggctgccgtttctgcaaggggacgggttggcttgagatcctcggatgcggcatggtcgatccgaacgtgctttccatgtcgggcatcgacccggaggagtattcgggcttcgcgttcggcatgggcgtcgagcgcatcgcatgcctcaaatacaacgtacccgatcttcgcatgctgctcgaaggcgacatgcgattcttgcgtcagttctagcggaaggcatggcaatgaaagtatctctaaaatggctgagcgaatacgttgaagtgcccaccgatgtgaaggcgctttgcgatcggctcgatttgaccggaacgggcgtcgagggcatcgagacgatcggcgccgcgttcgacaacgtcgtgacgggacggatcgtcacgaaggagaagcatcccgattccgaccatatgtgggtgacgacggtcgatgtgggcgataagaacatcggagccgacggaaaccccgaaccgctgcagatcgtgtgcggcgcgcagaatttcaacgcgggcgaccatatcgtggttgccatggtcggggcggagcttcccggcggcatcaagatcaagaaatcgaagttgcgcggcgttgcgagctgcggtatgaactgttccgaacgcgagctggggcttggcggcgatcacgacggcatcatgatccttccggaggatgcgcccatcggcgtacccttcgcagagtatcggggtcttgtcgatacagtgctcgatctcgagatcacgccgaaccgtcccgattgcctctcgatgacgggcatggcgcgcgagctgggcgccatgtaccagcgcgattggagcgaccctcttgccgacatggcttccgggatgcggatcgactcgaacgtcgaacccgttgacgaggcggtgcgcgtgaccatcgacgatgcggtgcgctgcccgcgctatacggtgcgggtcattcgcggatgcaaagtggggccgagtcccgattggatggtcgagcggcttgcggctatcgggcagcgctccatcaacaacatcgtagacgtgacgaactacattttgtttctgctcggccagcccctgcatgcgttcgacttggacaagctcaagggagaatcgggccaggcacacatcgtgattcgcgccgccgaagaaggcgaaaggctcgttacgctcgacggcgtcgagcgcgaactcacatccgacatgacggtcatcgccacgcccgagcaaggcgcggtggcgcttgccggcgtcatgggcggccttgataccgaagtcaccgatcaaacggtcgatatcatgttggaagccgctaccttcgaggcggggcgcacgagccgcacgagccgcaacctggggcttatcagcgaaagctcgatgcgctacgagcgcggggttgacgatcatggaatcgagctgcgctcggcggcggctgctgcgctcattgcggaagtatccggcggcacggtgagctatgctgcgcgtaacgatgcgggcatcgtggacgagtggccgctcgtgtccgaggtgcgcgagctcgccttccgcgttccgcgcttctgctccatgatgggcgccgatattccgcgcgatttcatcgaggatgccctgaggcggttgggatgtgaagtcgccgatgccgatgaggcgggcgcgctgcccgtcgtcgcgccgacgtttcgccccgatctcgaacgcgagatcgatctgtacgaggaggttttgcgtctgtacgggatggatcgcatccccgcaacgctgcctggcggccgcggacgtatcgggtcgcgcagcgaaaccgagcagaaagtgtccgctatccacgcggcaatgcgcgcgagcggcctgaacgagacgatgacctattcgttcgccgagcctgccgagctcgaacgcttgcgcatgaagaccgatggcctgggcgttgcagtcgagcttatcaatccgatgaactccgatcagtcgatcatgcgccagagcatcatccccgggcttttgcgctcggttgcctacaatcagagccatggcgtcaagaacattcagctctacgagatgggcgttgtgttctttggcgcagagggaaggaagaagcccaaggagaagcagaagctcgccggcgtgctggcgggagcgatgggcgaggcgggttggaatgccgatcctgctccgtttgatttcttcgatggcaaaggcgtaatcgagaacctgatgcgcgagctcgccatcgccaaggtgcgtttcaaggcgctcgaggcggatgaggctccgcatttgcagccgggtcgcgccgccgaggtgcttgcgggcggtgccgtgctcggctgggtgggcgagatacacccgctcgcggcagatgcatacgaggccacggcacctgtcgttgctttcgagttcgatatcgatgcgctcgtaaaggcgagccgcccggcgcgcgattacatcgacgtgcccgtgtttccagcggtttcgatggatgttgccttcgtggtcgatgagagtgtgacgaacgagcgcctggttcaatgcatgacttcggctggaggcaagctgctcgaaaaagcggagcttttcgacgtgtaccgcgatgaggagcgggtgggagccggcaagaagtcgatggcttatgcgctcacctaccgagcagaggaccgcacgctgacgagcgatgaggccgacagggcgcacgagcgccttgtcaagaaggtgtcagctgctaccggcgcggaggtgcgcggataggcggtcgccaagtcccctgcggcaaagattcgaacagcgctccggttgccgatgcggccggagcgcttctttttggcgtgaatgcttgcgatcgggctgtacatgcgggtcttctgcgcatatgtatgcaatatgtagcatgttgacaataataataaacataatcataatacgtttatgaaatacaaaatgaacgaagcatattgcgcacgaatggagtacacgcatggattacggaacattgactatcgacgagattcgcaacggataccgatacgacgaatccgagaaggcccacgtatgcaattactgtggacggaggtttcccgcggggcaggtgtttccgatgggggatcgttatttcgagccggagtttgccgcgcgcgagcatattgccgcagagcacgacggttccttccgcaagctcatcgaaggtggcgccaagtacaatacgttcaccgacacccaaaaagagctgctcggattgttcgcgcaaggcctatccgataacgagatcgcttcgaagctcggcatcaaggcttcgacggtcaggcatcagaagttcacgtttcgcgagaaggccaagcaggcgaagtactaccttgccgtttacgaagaggtcttcggcgaggatggaagccggcgcaaggccgaggatatcgtcgacatccccaacacggcaaccatgatggacgatcggtatgtgattactgaaaaggagcgtgagcgcattctgaagagcgagttcgaaaccatggagcccttgcgactgcgccactatccgctcaaagcgaagcggcaggtcgtcgtgctgagcgaagtcgcgaagctattcgacctcggacgcacctattcggaatcggaaacgcgcgagatgctttcggcggtgtacgaggattacagtatgcttcgacgctatctggtcgactacggcttcatgggtcgtaaaaaagatggttccgagtactggttgaagtaagcggctgcgcaaaacgcgctgttgttcggaggcggcttggccgcctccctttgcttgttccccgggttcggcaagggcgaacgccttccatcgaagggagctcttccgaagttcatcgctcttcgggggcgttggcctcaaggaagccaggcaagcaggttcagtccgaacgtaagggaaaacccgtagagtgcggcaaccgtgcccacagcaatgacgatgaatctgagcggcgagcgttttctctcgacgggggcgccattcgcctgggcgacgtcggcgaggtatcgaacgtcgtcgaacatgcaggcgaggcgatagagaagccaaatgaagatggctgccgcgcagctgcagacaaagaagctgattgctatctgaacgtagaataggcccatgccgaacaccttccttccgctcggccaagtatagcagcccaaaagctgattaaacaagtaatcgataaaggggctgattcgggctgattcgcggtgccgatcgcccgctcgggcggattgcggtctctgcgaatatcgtcggtggacatcagtgcggtcgacggtgataatgcactgaatatgcgaacgagagaaagagacgctatggacgtcgatgccatcgttgccgagatgacgctcgaagaaaagtgcgcgtgcctcaccggtgtcgattactggacccttggcggctgcccgaggctcggcgtcgagccgatcctcgttgccgacggccctcatggcttgcgcaggcagtcgggccctttcgacaatctgggaatcgccgaaagcgatcctgccgtgtgctttcctacggcgagcgcctcggcgtgctcgttcgacgtcgacatggtgcgcaagatgggtgaagccattgccgaagaagctcgcgatcagggagtttcgattgtgctcggacctggggtcaacatgaagcgcagtcctttgtgcggacgtaatttcgaatacttcagcgaagatccctttctcgctggagagcttgcggcggcctacatcgaaggggttcaaagccatggagtcggtacatccctcaagcactttgcggccaacaaccaagaaacgaatcgcttgatcgtcgattcggtggtggatgatcgcgcgctgcacgagctgtacctcgaaccgttcaggatcgcagtcgagcgcgcgcaaccttggaccgtcatgacggcgtacaacctgctgaacggaacgtattgctcggaaaatcggtacctgatggaggaactcgcccgcgaagcatggggtttcgagggtgcgttcgtgaccgattggggggccgaaaacgacaatgggaaaagccttcaggcgggactcgatcttgtcatgcccggtccccgccctgattatcgaaggagcatccgatctgcggtcgaagcgggcgatttcgagcgcgaccagcttgacgatgcggttcgccgtgtgctcatgctgcacgtccggcacatcgagggaaagaaaaagcagcatcgccggctcaatccctcagagcggcttgcgatcgcccaagaggtggcggaggcatcggcggttctgctgaaaaacgaaggcgctcttccgatttcccgcagcgattcggtcgccctcatcggagcgtttgcctgcgagccgcgctaccaaggggcgggatcctcgaaaatcaatcccgtctctttgacgtgctcccgtgatgcttttgccgagtgcggtgtatcctgccaatacgcggcaggatacgatcatcgcacgggggcgacaagcgaagccctgcttgcggaagccgccgcggcagcacgagctgccgaagttgcggtcgtgttcgtgggcctgaccgatgctgcggaggcggaaggatccgatcggacggacatggcgcttcccgaaggccacaaccagttggtttcccgcgtttgcgcagcgaatcctcggaccgtggtggtcgttcagggcggggcgcccgttgagatgccgtggagattcgaaccccaggcgatcctgctgagctatctggcggggtgccagggcggtgcggcgaccgcatcgatattgctcggcgatgtcaatccgtcgggaaagctcgcggaaacatggccgatgaaactcggcgatgtccaaaacgcctcttcgtatccatcttccggacgtcaggcgctttaccgcgagagcatctatgccggctacaggtacttcgatgctgcggaagtcgagccggcctatccgttcggcttcgggctatcgtacacctcgttcgagtactcccgcttgctcgtcgagcgcgatggcgaggggttcgcgattgcctgcacgattcgcaacagcgggggtcgtgcgggaaaagaggctgttcagctctacgtcgcccccgtgtcgcccggcgtgttcaaagcgcctcagcagcttaaggggttcgcgaaggtttttatcgatccaggggaggagcgcacggtttccttctttctcccgcggcgtgcgtttgcgtactacgatgcccgcacgaaaaggtgggatgtcgaagcgggcgagtatgagattcgggtatcggcatcgagccgtgacgttcgcctgcgcaagcgcatcgtcgtttcagggtcggcgaagcgtttcgaccacgcgcccgaatcctaccgcgacgttgtggccgcctctttttccgacgaggctttccgggagctttacgcgcggccgctcccgaaggttctcaccgccatgcggccttatacggccaatgcgacggtcggggatttgaaatcgtctcttatcgggcgcatcgtgcagtgggcgttgcgccgcgagctcaagttcctcgttcccgacgatgaggaaacgcgtgccgcgttcgaccgggcggccatggacaccccgctgcgtgctgttgccatgtcgggcatcgatatgggcgttgtcgaaggagtggtcgatatccttaattaccgcttcatccggggggcgaggcggctgcgcgctgttaaccacgccgcgaaaaaggctggtagccaacatcttggacgcaagcctgaataggccggacggagcccgcaatggcgggtcccgcatgcgttgcggtaggtcggtgggtttttcgggagagttctccgttgtcggaatgcgggctatatcccaagcggttccgcaaacggcggctgccgtcagcgtcgcccgctcgatgggtgcgggtgcagctaggtgcatgcgcgtcgacttgggtgcgcgcgtggggatcggggaattgacgtacgcgtgcggaggcgtcctgggttggcgtgcatgaggggatggagcgccaaggagggtgcatgctgcaggcgtgacagcggaaacggcgaaaatggttgaaaaattgactttgggcagtgataatcgcgataatcggtagtcggtttcgccgagccgatgaaaacgcgcaggtcatgtgaatccgtgccgcccgccttattgcccaaactgtatttttcaaccagtttgacgaaatcctctgtcaaagccttgcctccatctcgtccaccttccgttgcccgccttctgcccgccgcctttctacgccacgaagatcgaggcggtcatcctcgtatgcgtcggcggcttgaagatcaacaccgatttgcaagtgctcaaggaggacggcacgcccatcgagggactctatgcgaccggcaacacctcgggagacctgtatgcggtcgactatcccatcaacatgcccgggaactcgaatggccgatgcctgacatgggggtatatgctcggcgacattttagcgaagaattaaagccagctcggaattctcgttgaaaaggtgctttgcggcgcgcatggggtattcgcatgcgcgccgcggcatttgatgcttttttgacattcgtctgctatcgtttcaacaactggcgatcgcgtgcgggatcagacgaaagcgggatgcatggaagaaaaacccctcatattgatagcggacgacgagcgcgatatcgtagccatgctcaagagctatttcgagctcaaggggtatctggttgcgactgctttcgatggcgcgcaagtgctcgagcgcgttgcccggcagcgtcccgatgccatcctgctcgatgtcaatatgccggcgctcgacgggatggaggcgtgtcgagcgattcgcgattcggtgtcgtgcccgatcatcttcctcacggcgcgcgcgttgcggcgcatctggcgcgcgatcggcgcaggcaggttgcgagcacggttcgcatcgacgagcgtctaagcatcgatttcggccgcagggcggtgctcgccgacggcgaggaggtatcgctgacgcgcaaggagtacgagatttgcgaattgctcgtcaagcatccgaatcagacgttcgatcgcgaccgcatctacgagcttgtatggaaagagcccggtgacggttcggttgtaaccgagcacattcgaaggctacggcgcgctctcgccgatgcgggcggcgagaaggatcgcatcaagacggtttggggcgtgggataccgatggcaggcgtaggcgtgccaaagcggaatggcgcttccaaagtggttggaaagccggggttgctccacccgatgcaacatgtgcgggttttcatgcggtcgtgctccctcaagacggcgttcgtcgtctatgccattatcgccacgatcgtcgcccttgtcgtatcggtgctggcgtcgagctatcttgcgaacagcgcgtcgacgctttggagcgaatcgcatatgcgctcgggcatgtacatctaccttgccgaatcggaaaagctcgttcccgccgaatctctttcctggtatcgggaggatggcaaacctctgtacgtcgaggtttcgccaggcgattcggccgaacccgtttcggtgcggggggcgggcgaggggggagagaaccccgttgtatacgacggccgtattctgacggatgacgacatggctgctggcgccacggaggatccgatcgctctttcggatgttcccgaatacgatgcgcggcaaaaaggccgcgaaaaggaatcggcggcttcgatgtggctgccgccgaacgaatacggcgaaaccccagccacttcgacagtggcctactatgtggtgtttcggccgcagggcgccacctacgacgtgctgcaactgctctccattttcgtgttccccctcgtgttcgcgctcgtgttcatcgtcgccgctcgcttgttctaccgaaatcacatggggggctccatcgcattgatgaacgatgccgccaaccgcattgccgaaaacgatcttgattttcatcttgagtccgacagtggaaacgagctcgggcgcctggtcgtgagcttcgaggacatgagggcctcgctgcttgcgaacagtcgggagctgtggcgagttatggaggcgcgcagagaggcaaacgcggcgttcgcccatgatctgcgaactccgctgacggttctcaaaggacagctcgaaatgctcgtatcgttcaccgcgtccggcgctctttcagccgatcagatcgaggcgatggcccgagcgtcgcagaggcaggccgaacgcatcgaacgctatgttgaaaacatgcgcgatttggctcggctggacgattgcgagatcgaggctgtggatgtcgatgtatcggagcttgcagcgcggttggctgaatcggcgcgcgctttggcggcggaatgcggaaagcgcgccgataccgttgcgaacggtttgcctgcaacggtccgcgtcgatccgaacgttgtcgagagatgcgtcggcaatctgctggcgaacgcggctcgctacgcgcggtcttcgatcgttctgacgatcgaaatcgaaggagcgtgccttgcggcgatcgtcgaggatgacggtccgggcttttcggatgaggcgctcaggcacggactcgaaccctatttccgcgacacgtcgcgcgatgactcttcggagcatttcggcttggggcttggcatctgcgctgccctgagcgcaaaatgcggcggctcggtttctctttcgaaccggccgtcgggggaaggcgcgcgggtggaaatccgttttccttcggtttccagccgttgattcttatttgtgatttgccgttcatgatggttctagcggaatctcgaaaggacgatcatggaatacgatggcactcgcggggcacagcgtgaagaagcacttgcggagcatacagcggcgattgcccgatgtgcggcggggcaagcggtcggcagaagccttcgggcgaagcgcgtcgcagtcatcgccgtcgcggtgattgcgctcggggcgacgatcgcatggctcatcttgtacggcggcgatgctttttctctgttcaccgatggacagcggcttcaagcttgggtcgatgagcgcggcgtgtttgcgcccgtgatcatggtttttctggtagtcgtccagatcgttatcgccgtgatccccggtgagccgcttgagctgggtgcggggtacgcgtttgggttttgggagggaacggcgctctgtcttgttgggagcctcgtcgggaccatcgttgtcgttgcgcttgcgcgtacggctggcatgcgagtctgcgagctgttcttctcacgcgagaagatagcgtctttttcgtggctgcagtcatcgtctcgcttcgaattgctgctgttcgtgtgctttctcattcccggcacgccgaaggatatcatgacctacattgcgggcctgacgccatgcagcgtcgggcgcattgcggcgatcacgactgtcggacgcattccctcgatcatttcctcgacgctggcttccgctttcgcggcgcagggcgattggacggcgaccgccgtggttgcggcggcgacgcttgcgcttgtcggcatcggcgttgccgtttacgctgttatctcgaaacgcgaaaagcagcggggagaatcccgtgcatcgtagccttctgccgcggggctcgaaagcgctccttgcggccaagtgccttgcgggtgcgatcccgaacgtaacagacccgaaacacggcgcataccggcccgaaacaaaccatccgtaaactcgaagaaccacagaatgcgggtgctctgcatccggcggcatcccgtactgctccgcaaagcccgtccgatcggcgcccgaggagcgatgccttcggatcggcgcggctgattggaatcggcttcgaggcgccttcggcggcgcacggcgccaaaacggagccttccgcatttcgcgcgacgaggaaagacgaggtgttttgacccatgcgtttaagagaaggcgatatcaggataccctccgggtgcgccattgccgggatcatggatagaagtggcgggctgcatgacggaagcgatatcctgaaggccatcgccttgatgcacgatcggagcaacggcctcggcggaggattcgccgcctatggcatctatcccgaatacaaagagctctatgcgtttcatatcatgtacgaaagcaaagaggcgcgaagcgcggccgaatcgtacctggatcagcatttcatcagcgaaaagcaggagcgcatacctaccgaatcggtgcgcggcattcaggatcctcccgacatctggcggtatttcgttgcgccgcatcccgtcaagctcaacatgagcggccttgatgaagccgagtacacgatgcagcacgtattccatatcaacgcatccatccacggggcgttcgtcgcatcgtcaggcaagaacatgggagccttcaaaggcgtcggctatcccgaggacatcggcgagttctaccgcatctgcgattacagggcgtggctctggaccgcgcacgggcgcttccccaccaacacgcccggctggtggggcggggctcatccgttcacgttgctcaactggtcgatcgttcacaacggcgagatatcgagctacgatgccaatcgccgctacgtcgagcagttcggctacgagtgcacgctcatgaccgataccgaggtcatcacatatctgttcgacctgctcattcggcgccatgggttctctcaggaaatggcggcccatatcatgtgcgcgccgatgtgggatgaaatcgaccgaatggagcccgagcgggcggcttgcgaggcggcgcttcggtgcgtgtattcgagcgcgctcgtaaacggtcccatgtcggtgatcctcggctccgacgagggcttgctcgcactcaacgaccgtttgaagctgcgcgcgcttatggcgggcgagaagggcagcatggtctaccttgcaagcgagcaggccgccatcgagatcgtgtgccccgatgtggaaaacgtcgcgcccatcgacgggggagtcccgttcgtggtgcagctcgacgaagttgcggctcgcaaagcgaaagagtcgcacgagaacgtccccgcgaaagacaggccgcaggagcacctgacaggcgtcatgcccgcatcgagcaagagggaggcccatcatgcttgattgcctgcttccccgctacaaggtgctgcgcgatcccgatttatgcactgcgtgcggagtgtgcgaacgctcgtgtgcgaatgaagtccatcgtatcgatggggagctcggccgggtgacggccgatcatgcgaaatgcgtcaactgccagcgctgcgtggtgatgtgcccgacccgggccctcgccatcgcccggtggcctcaggttggcaacggttcgaacaactggacgcttgcagccatgcaggatatcgccaaacaggcgcagaccggagccgtgctcctctcgtcgatgggcaatccgcagcactatcccatctactgggatcatctgctcttgaatgcaagccaggtgaccaatccccccatcgatccgttgcgcgagccgatggaaacgcgcgtgtttttgggcagccgccccgataagctcgtggtcaacgagcgcgagcgccgcatagtctcgccgatgcccccgcagctcaaactcgacatccccgtgatgttttccgcgatgagcttcggctccatatcgttcaacgcgcagaagtcgcttgcgatggccgccgaagagctcggcacgtatttcaataccggggagggcggtctgcacaaagacctcgaacgatacggcgatcatgcggtcgttcaggttgcctcgggccgattcggcgtcgacatgcactaccttaatgcgggctcgatgatcgagatcaagataggccagggcgccaagcccggcatcggcggccatttgccgggagagaagatcaacgaagaggtttcgcgaacgcgcatgattccgcagggaaccgacgccatctctcccgcgccgcatcacgacatctactcgatcgaggatttgcgtcagctcgtattctcgttgaaggaggctacgcgctacacgaagccggtagcggtcaaaatcgccgccgtccacaacgttgcggccatcgcaagcggcatcgcgcgggcaggtgccgatgtgatcgtgctcgacgggtttcggggaggcacgggtgctgcgccgacgcgcattcgcgacaacgtgggcatccccatcgaacttgcacttgcagcggttgaccagcgcctgcgcgacgagggaatccgctcgaaggtcagcatcgtggccgcgggttcgatccgctcgtcggctgatgtcgtgcgcgcggtcgcgctcggggccgatgcggtgtacagcgcgacggccgcgctgatcgcgctcgggtgccaccagtgccaggattgcgcaagcggcatgtgcaactggggcatcgcgacccagcgccccgaactcgcgaagcgcctcaaccctgaaatcggcgcagagcgcgtggtgaacctcatgcgggcgtggaaccacgagattgaagagatgatgggcggcatgggcatcaacgccatcgacagtcttcgcggcaaccggctgatgctgcgcgccgtcggcctgaacgataaggaacttgagatactcggcgtgaagtacgcaggggagtgatggacatgaatcgatcttacgaaacggtgccacggcgcaaagtctccgacgtttcggtgaccttgggaaccgagcattttaccgaagcgaacgcgctcgtgcgcgaagccctcgggaaagctgcaaccgttgagatacgcgaggctttcgcgcagcgctatttgggctgcggtatgcaggcgggcaagacgctgctgatccacggcgtacccggcaacgatatggcgtgctacatggacggtggcgaaatcgaggtgttcggcaacgcgcaagaccagatcggcaacacgatgaacgacgggctcgtcatcgtgcacggtcgctgcggcgatgcagctggctacggcatgcgcggcggcaagatattcgtgcgcgacgggtgcgggtggcgcgtggggatccatatgaagcagttcgaggacaagcgccccgccatcgtcatcggtggcgatgcgggcagcttcctcggggagtacatggctggcggcgtcatcgtgcttttgggcaaaccgggacgctatcttgcgaccggcatgcatggaggcgtcatctacctgaggcacgagcttgctttggaagaggtgccgaaaggccttgttcagggggcggtcgatgacgccgacaaagcgattgtccgttcgctgctcatcgaatacaatgcgcatttttcagacgacctcggctacggggtcgatacgagcggcgagggctttttccgcctaaggcccgcttcgtctcgcccttacgcgagcatgtacgccaactgattcgcgctgcgcgttcgcgtgcgcgatggtatgacccgctgccttgtacgggggccgcgcggttcgggccgggttgcgtctgtggcaacccggcctttttcgaatttccgaagcggcgatgttgccgaattggcaacggagagctgatcacgttgctcggaccgaacgggttgggcaaatcgaccttgctcaactgcatcatgaatctgcttgaaccccaggccggcagcatcgtgctcgatgggctgccggttggtcggatggggcatcgcgatattgcccagcgagtggcctacgtgccgcaatcgatgaatgtgagctttgcctataccgtacgggattgcgttgccatggggcgtgctccgtttctcaaaatgtattcatcgccttcgcccgaagactacgcgaaagtcgatcgggcgctcgaccgattgggcgtgtccgatttggctgcgcgctcgtataacgagctttcgggtgggcagcggcagctcatcgatgtcgcccgagctcttgcacaggatccgcgtttgatccttttcgacgagccgacaagcgcccttgactacggcaatcagatcaaggtgctcaggatggtgaaggaactctcttatgaaggttatgctattgtgatgaccacgcacaatcccgatcatcccattctgcttgacagctcggtgtgcctgctcgatcgcgatggctgtttgacgaaagggaccgtcgacgagatcatgcaagaagatcgtcttgaagccgtgtaccaatcggagatggttatccgctacgtggaagatgcgagacgccgtgtttgcatgacggctagattctgaaatgcggtatcgggcgagcgccgctgcaccgtctcggttggcggcggctgactggcgagttcgacatgcggcgttcccctgttcctatgcgagggcgagtatcatgaggcggtgctctaccaagcgatcaatctcatcaagcgcttcgagatgcttaacatcgccagtgacgttgccaggcgtgttgtatcaacgatgttgcagcgcggggttattgcctgttggacttccgtgcattcaggcagatcaaaaaaacgagccctgtagggctcgtttgctttacgtatgtgccgtccgatgttagtcggtgcactcgacaagcgtaatctcgaagttgagatctttgccggcaagctcgtgattcatatcgaacgtggcaacgccgtcggtgatttctttcacgaaaaccgggaaaggctggccgccggggccctgcatgtagatggtctggccgacgggaagctggtcgccgttgggtatctgggaaacagggatcttctggatcagctcttcgttgtactcgccgtaggcttccgccgcgggaatgtgaacggttttggtctcgccgacagcgaggtctttgacggcagcatcgaagccagggatcatctggcccaccatgcaggtgaactcgatgggctcgccgcggtccacggaagaatcgaacttggtaccgtcgtcaagcgttccggtgtagtggaccttgacctttttgccttcgttgctcataaaagagctcctttcaaaagaaaacagtggattcagtctacctgaataggcaagcgcagccggcccgcaacggcgaagcgccgcagcttcgtcacaattctgtaggatatgcgtcgacttcggcgcggctttctgctcgacctcgtatcggattgccgacccgcccgtcttggctgcgatggatcagcatcggtcgaggtcggtgactgcgatcagggttatcgtgaaattgagcgcctttgctatggcgtcgtggttcgtatcgaaaacaaccgaatcgccggttgcttcgatcacgcgtgccggataggtttggcccgaagggtcctcgaggttgatcatttcgccaagggggagcttgaggttggcgggaatcttatcgcgcgggatttcgatgatgcgctcgtcggttcgctgctcgtacgcttcgtctgctcctacgcgcaccgatctcgtttccccaatcgccatggtgcgaacggtttcgatgaacgcgggcggcatccacccgtcgatgcagggaaactcgatcggctgctcggtctgatcgataaacacatggccgtcatcgaaacatcccgtgtacgataccgtgaccatcttgttgctgttgtccatggcgtgtccttgctgatccgatttgcgtaccgggcgcttctggtcggtcggcgcctcgtggcttgacggttacccctcgagaaaccactcgatgcggccgcagttcttgcatatgaggatcgtcgcgctgcgattcgcccagtcgagaccaagaaacgtgaggcctaccgtattgagctgtgcatcgcttttttcgaaatcccgagagccgcagtgcgggcaaacgacgggttcgcctgcgatctcgtacgaatagtcaccgctcaatcctcgcttgaagctgctgatgaatcccatcacgtcctccttctcgcatgctgaaatgcgctgtcgagacatcgcgaacgagttgcggcgctgacgcgcgctctcgaatgcgaccatcctattgtatccgttttgcggggttgtcggctgggcgtacattgccggagcatgggttcggctgagtctcctccgaaaaaaacgcccgaaaatggcggccaaggcaagcttctgtaagaaatccaggctgtgacgggtgctttcgatgcctttcggcactgtttctgctgtttgggtttttgcgaccagggcaaatgccggcaggtgtggcgcgcggacgcgatcgcggtgacggaagcttgccttggccgccatttcaggtgcaattttcgaaaggaacgattctcggggggaggtttgggggcagatcggtttcgcgagcgtcttttgcgaagggcgcgaaaagcgcactgggcatgccgcgtcgcaacgatcggcgtaccgtgctatgcagatagaatgcggtttctgcgacacggctctactttgctcggcgtattgccgcatcatgtccgacggcgatcggggaggtgcggcttcggggcatcggccatcgtggatcgcttgcgtttcggctggtttttcctcaatggttttcttcctgaaacgcgtcgaacagatcaagcagctccattttcgtatggatgcccatcttcttatagatgttgtaggtatgggtctttacagttccgatggcgatgaaaaggttttgagatatatagagagttgttcggccctttagcagcgggtcgagcacgtctatttcccgcttggataattgccacgccttgccgaattggcgtatgctttcgtcgggcgtgtgattcggattgttgttcctcacaaccttttcctcgaagctgcgttcttcggctatgccgctgagggagaacacttctttttcggtgaacaccaacgtcgaagcagctacggttatcgtcatgccgactcccacggcaacggcaagcgggggcaggaactcgggaaggttcgttgtcgcgatgccgataagccagcctaaaagcattccagccgtgatcgcaaagcgcgcgatgccgaatgttctcaggggaggcaggtcgttcatttttatcgcattgcagaagtcattgaggatgaggatttcgaatgtcaagtaggccgtcatgatgaaggcatctgcggcgaagaacacatgctggctgataaacagtaaaaccgccaacccaattgaaaaggcgagcggaacaaaacggtagagatagtaaatgccgcgcgctttctttttggagttgtatatcaaagcaatggcaatgccgaggccgatgcagcaaggggcttcgatgtagggcccggcgatgtccccgctgaacccgttgcaaacggcagtgctggttatcaggctgaagagcagggcgtacaagcccagtgccgcggtcattctggttatgtagggaaatattggcgcttcccgattcccgttcgttctcatttcgctcaaaaaagtggtgctcgacgagcccgcttcgtgctcatagagcttattggagtagaggaaagtgatgcccgaaagaaatgggagcacgatagcgcagatgcgggccgcttcgtcgccgattcccatgatgcatacgaagagcagcgatccaactgcataggagagggtcatatagagtgcggtttcaccgagtttcatatgcccgaagaagctgagccacagcatgaagatggaagcgtcggcgcacgcaaccagcgcgattgtgatcggggttgcctcgaagccgaccaggagtgccgaagacatcgagccgacaatgcttccgacgcacagcaggaacatgcgccctttcaccgacgaaagccatgcggagaaaacaatgatgagcgctatgcccatcaatctgaacaggagctccatggcctcgaggggaaaggtgggttcggcttcgatgtcgagtatcggtgtcggggacacgccgacgaggaacagccaagcccagtagagtccgaaccccaacattcgaatcggaaaaagcgtttcaaccttcatggttccccctgacatgatcggctagctttgcaattcgacgatttcgtcgtccacccctagtcagtgtaatgggtttaggggctgcacgacataaaccaatagtcataaagatcctttatgacctttagatgatttgaaaacatgcgctcggtgtctaggatttcgcgtcaagcgtatcccgctagtgcacgacagaatcgtgctgcaagaagaaggagatgggtgcttatgggtgtcgaaacgaggggtgagacggtctatcgcggtatagcatggtcggcgtttgcgtgcagcgcaaataccgcagcagtcgatgttaaggatgggaagatcattcgcattcgtccgttgcactacgacgaggtgtcaaccgaagagcaacgaaggccgtggcgcatagaggcgcgcggcaaggttttcgagccaggcgaaaaaactctcctcccgccattgtcgctgacatacaaaaagcgcatctattcgaaaaatcgcgtgctgtatcccctgaagcgcgttgactgggacccgaatggagagcgcaacccgcgcaaccgcggcgtatccaaatacgagcgaatcagctgggatgaggctacctccatcatcgcttcggaaatcaagcgtattcatgatagctatggacctttggccataatgtgccaggctgacggtcacggcgagacgaaggtggtacatgctccgcatggagcacaggcgatgatgctcgagttatgcggcgggtatacgctgcaagcgcgccaacccgacagctgggaaggatggtattggggcgctaagcatgtttgggggatggatcccgtcggcatgcaagttaatcagcggaatctgtacaaagacgtttgcgaacacggcgatgctgttctttattggggttgcgatcttgaaaccaccccttggggctggggcggccagcagccaagtcgcatggcgtacttcttggaggagctgggtctgagatccttcttcatttctcccgatttgaactacacgggcgcctgccataaggggaagtggattcccgtgcttcccaataccgatgcggccttgcagcttgccgttgcgtatgtgtggatcactgagaacacgtattacaaagagtacgtcgaaagccatacggtgggcttcgattggttcgaatactacgttctcggcaaggaagacggcgtgccgaaaagccctaaatgggctgaggagaaatgcggcgtgccaagctatacgatcaaagcgtttgcgcgatattgggccaaacatgctgtttcgattgcccatgcggatggcggcggcatgattcgatccccgttttctcatgagccggctcgcctggagatcgtcttgctcgccatgcagggattgggtcgtcccggtaccggtcagttgcatatgatcgaatttgggcaattcgggttcgacgagtggaatcccatgccgcgatcggaaaaatatttcgaggttcctggtgcttaccatggatggatggagacaatcggacgccaaaatttctttccgaaaaccatgactccccaggcgctgacccttccggaaggagaaaaactgcgctggtacgggcatgttgtatgcacagcgcctcgcgccgatcaattcatccccttcgagtttcctgcggacggtgcacctatgatccatatggtcatttccgattcaccgagttggacgacgtgctggaacggcggctactcgatgcaagacgctttgcgcaacgaacgggtcgagaccatcgtcatgcaacatccgtggtttgaaaacgatacggttttcgcggacatcatcttgcccgttaataccatgttcgaagagaaggacgttgctgtggacaactggtccggacagttcaacatgatgtacatccaagatgattgcatcgagccgctcggagagtcgaaatcggattatgagtgcgcaatcgaggtcgcgaagaagctggagcggtatggcggaccatacgagaatcttgttgaacgctatacgcagggcaaatccgtggatgagtggatagaggcggggttcgaaagcgcacaggcaagcgaattgatgtcgtacgacgagtttgccgaaaagaaaatatgcttggctccgacagccgagggctgggaagacgatcctgtggcgttaagcgcttggtacgaagatccggcagcgcagccgttgtctacgccaacccaaaagatcgaaatatactcgactggtttggcggagcattttcccgacgacacagagcgtcccatcgtgccacattggatcgaagaaacggcggagcacaaagagcgcatttcgagtgatcgcgcggtgaattacccgtttctcatggtgacgaaccatccgcgttggcgtgtgcattccgagcatgatgacgttacatggatgagggaaatccgcacctgcaaggtagagggtcccgacggctatctgtacgaacctgtctggatgaaccccgtcgatgcaggaaaacttggcctcaaagatggcgatgtcgttcgcatctacaacgagagaggctctgttttgggcggcatgtatgtgaacgagcgcattatgcccggtgcggtctatcaggaccatggcgcacgcgtcgatgcgatcgtgacgggtaagtgcggactcgatcggggcggtgcaaacaacctcatctgcccaacggcgaccacgtcgaagaatgccgccggagaagcgaccaacggctttcttgtcaatgtcgagaaggtcgatgtgtttgcgcttgccgagcagtatcccgaacaatttggacgcgaatacgatcctgcagatggtttgcgggtatcggcttggatggtagacgaccgatagggcatgttgccgaacgtgcggcgcgccgatcccgaaatggtgcgccgcaattgcgagcagcaatcagcgaaaacggagatgcgcatgaaagtatttgtttttgatctcgataagtgtaatggatgtcacaactgtcaggttgcctgcaaagacgagcattgcgatacaagctggcttccttatgcggcggaacagcccgatacggggcagttttggtgcaaagtggacgaggaggtgtgtgggaaggtgccccatgtccgcgtccattatctcccgcatctgtgcaaccactgcgataacgctccttgcatcgccgccgctcccgatgcggtgagtaaacgcgaggacggcattgtgctgatcgatccgaaatcggctcataattctgaagcgctggtcgcctcgtgtccgtatggtgcgatcttctggaacgaagaattgggaatcgcccaaaagtgtacgggctgcgcgcatctgcttgatgacggatggaaggagcctcgatgcgtggatgcctgttgcacgggagctcttcggttcggagaagaggaaaagttcgagtccgcgatcgctcaggcagaggtgctgatgcctgaggccggtacggctccccgtgtgtattacctgaacaagcccaaacgttttattgcgatgactgtcgttgacattgaggctgatgaagtggtcgaaggtgcggatatcgtgttgcagcgcatctccgacgaggaggtggttgcgcggtcgatgactgacgagtttggcgatgcgtggcttgaggggttggagcccgatcgctatcgcatgtggattcgaaaggggggttatctcgatctatctgcggagttcgatctatcggagaaagattgctcagtgcctgaaatgcgtttttatcgggtgccgactgcagtgtaagcgctgcggtttctacagtggcgccttatatgtcgggaccctttgaaagaggtttcggggaaccgatatcgaggcgattcggattgttcacacaaggaggttctcatgggtactggtaagaaaggaaagggagcgaatgccctcaaaaggggttatgggatgaatgaggtgccacgggccggcgaactcggggctttcggattgcagcatgcgctgctcatcctgtttcagacgctgcccgcccctcttctcatagcgggcggattgggcatgggcccggtggagacatccattttgattgcatctgccctgttcgtcagcggcatctgcacgttcgtgcagagtttcggcgttggtcccttgggggcgaagatccccatggttatggttgggagctttgtgtttatagcacccgctctcttgatcattccgcaagcgggattcggcggatacatgggcgcatgcatcgttgccgccatcatatgcggaatcgtgttcgtgcttttttcggattggctgaaagtgattttcccgtcgttcatttccggcgcggtgcttttggtgctgggaaccggtctcatcggaaacgcacttgcaaactgtgcaggcggtagcggtgctgcaacgttcggcgacccgatcaacctcgcgttggcggctgtgacgttcctcatcactctcgtgctgagcgttttcggcaaggggtttatccaaggcgccgctccgctgatcggcatggcagccggtttcatcgtggccattttcctcggtatggtcgacttcgcttcggtttcggaagcggcctggttcggcttgccgcaacctttgcattggggcatttcgtttccgatcgacgcatgtttggttatgaccctgatagcggtgtgcggagtcgttgagattctcgggaccactgctgcgacgaccacagttgcagataggcgcatggctactccgaaagaaaccaagaagaccgttttcacccaggccgttacgagcgttttcgctggactgttcaatgcggttcctaccatttccggcagtgcgaacatcgggctcatggatgtaacgaaggtctatacgcgctatgcggtttccgttgcgggcgggcttgttttgctgatgggcttgtgtccgaaattctctgcgatattctccgtaatcccgaatcctgtgttcggtggagcggtgctcatgctgttcggttccattctcgtcaacggcatgaagataatcatggattccgaacaaacgtctcgcacgcagaccatcctcgccgtttcgcttgctgtgggcattggtttcaactcggttgcaggtgcccttgatcagttcccgttctgggtgtctaccatgctgtgcggcgttcccggaaccgctttcgtcgcggttattctgaatatcattttgcctgggcgcaatctgaagaagcaatccgtgtatgcgggcaccgaatccttgaaggaagtcgaggatttcgggggtgtcgagttgtctgctgacgaagaggaagaggtcaaggcaggcgcgcagggaggttcggcgtttgcggtaaacgcgcctatggccgatggctctgcctctcgaaaggcttgacgttcttatggggtgcggcggcgcattgcggacgccgcaccctgcttttcgttcgactgcaaactccgacgcatttgatcgtaggtgcgtttttgcagccgatcgcgtatcaatggcgcctcaacgccctttgtcccgccttcagcggcttgaggctatcgaatcatcggtcatagggccgatgctaagggggatacaatgaaatcgcaaggctatgggatgaacgagcgtcctcccgtgcatgagctgattcctttcggtgtgcagcatgctcttctggtggctttccaggcgctgcccgcaccgctgctcatcgctgcgggtttgggttttgaccctgctcaaacaactattttggttgcatgcgctctgttcgtggcaggaatctctaccatagttcaaacgttgggtatcggttcggtcggaggaaagcttccgatcgcaatggtttgcagtatcgtgttcgtttcgcccgcgctcgtcatcgcgccgcaggttggatatgccgggtatgttggcgcctgccttgtcggcagcatcgtgtgcggcgtggttttcgttgccttttcagacaagcttaaaatcatcgttcccacgtttgtgtcgggagcggtggtctttgttttaggcacgactttgttgggtgttgcgcttggctattgcgcgggagggtcgggaagcgtcggcttcggcgaccctgcgaactatcttcttgcgggcataacgctgttgaccgttctgctcttcaacgttttcggaaagggctttttacacggtgccgcgctgctgatcgggttggcggttgggttttcggtggcggcttttctcggtaaggtcgacttcgctcctgttgcggaggcggcgtggtttgcatttcccgaacctcttcattggggaatcgagttccccgtcgatgcgtgcatcacgattgcctttctggcgatttgcggaattgcggagcttttgggggatacatcggctacgacgatgatcgcggaaaaccgaatgcccaccaagagggaaacccggggcgcaatcttcacgcaggcggttacgagcgcgttttcggccgtgttcaacaatggtcctactatttcagcaagcgcagatgtgggtctcctcggcatcacgaaggtgtgcagccgttacgtggtcgccgtggcaggtgtcatcatggtgtttgcgggcttgtgtccgaaagtcagcgctctttgctcggtaattccgactcccgtattcggtggggcggttatcttgacattcggcattgtaatggtcagcggcatgcagataatcatgagggtgaaacccgacacgaggaccatgaccattttggccgtttctctggctgtgggcttgggctttagcgcccaacctgaagccctggcgagttttcctctctgggtttccatgtttttaagcggcgttcccggcacggcgcttacggcagtagctctgaatctgattcttcctggaagaaaaaaggttgcagaggacgatttccaagaagaatcgagcgaaagcatgtaaagtagcgcatgctgggaggcgtggttgctgcgttccggcgatacggcatttcatcggcggcgaaagccaattggcgcctagattgcagtcgttgccctccgatgctgcgatcgatcttccgctgcgaagattgatcgcagctgcgcttgggtttgcgcgacggtggatcgatcgctcgggtcggtggcatatgcgcgtggtctgaactcgcgcatatgcttcggttagcctcgctctgcgatgtcggcgagcgttgtgcggtcggcgacgagagcggcaagcggatcgaggtagcgttgctcgtcgggcgataagcccgcccggcctatctcgatcacccgatcggccagttcggcaactggacgcccgtaaacctcggcttcgtagcctctttccatgagcgtctcttttgcggcatcgatgtccgctcccgtcacgccgtcgaacagcgcttcgagggcatcgaggttttccggcgtggcgaacagccccttgaccaggcccgcgtaggcgattgcgtaagggatgggcagggcatcggccggacggatctcgatgtaggttttaagtcgaacgtcgttgaagaacatcgacagggcgtgctcgacatcgcttctgtccatgacggtgtcggcgtagagctcgccgaacgtcttttcggaataacaccacccgtgtttggcgcatgcgacgaggatggcgggtttgtcgagcacgtattcggcataggcgcgcatgtcgaacccttcgtccataacgccgggaacgaggccgcagcgatcgggatcgcagtacttccagatttcggtgcgcatgagctcgtgcgggcgtttttcgccttcgaagacaggcgagttgtcgcacatgagcgaaaacagcggcacgagcgcgtaggcgagcttgagcttgcgcaggcagtcttcggccgacgcgtagtcaaccgacacctgcgtcgacgcgctgcccctcatcatgcgcggaccccacggaccgatctctcccaagtagaggttcatgaacttgtagcgacgcttagggatgagctcgagctcttcggcgcgcgccgtcgggtggtagccgatggccaaagccttcaggccgacgggggagaggatcttttccaggcgctcttcgaaagagagaaagcacgcttcggcgcttgcgaggtccttgaaagggccggcggagagctcgagctgtgcggccggttcgagcgtgaccgcctcgcgaggccggctcaggccgagcagatcgccgtcttcggcaaacatcgcttccgagaagtctccgcgaagctgttcgagcagccagtgcacgccgtgctcttcgctgtaggatacgggttttccgtctgccgcttcgactatcgtatgttcgagttcgatgccgatttccccggtcgccgatttgatcccgctctcgtaatacgcgatgatcgccgctatgttctgctcgcgggcgggctgcgaaccggggttgccgcaagcggctgaaccgtgccgctctgccgcaggttgcgtggctgtagtattcatgtagtgaactcctgaaaccgttccgatagctttccatggtaatcgatttgtgtacaatactccttcagcggcaaaaacctgtagctattctgaaaccaaacacatttttcgctgaaagcaaggcgcaatggatctccatatcaccaaacgaacagcacttttgctgttcttcgatatagcggcgacgtatgccgcgtactggcttgcgtcccttctgaccgatgtggtgggcgaggttttccacaacaacgagatatatttcatgctcggcatcctcgctctcatcaacgtgctcgttctcggcgtttttcatctgtacaacaacctttgggagtacgcgagcgtcgacgaggccatccagatcgtgttggccgttgcgctctcgacgctggttggcgcggtgtttctttggatcatcgatgtccgtctgcccatccgcgtgttcttcgtcgcgctgttcctcctcatattcttctgcggtggcatgcgcatggtctaccgcgtcgcgcgccgcaagaagcgggcgttctcgagcccaacccacgcctgcgacaggccgcgcacgctgatcgtcggtgcgggcgaaacgggttccctcacgatcgaccgcatggcgagcaaagacccgcttatgcccggcatcccgatcgtcgccgtcgacgacgatcccgcgaagcggggcttgcgcatacacggcgtcaaggtggggggcacaagcgacgatatcatcgatctcgtcgacaagtacgatatcgagcagatcgtcgtcgccataccgtcttctacgcttgaggcgcgcaggcgcatcttcggaatctgcaccaagaccgattgcaggttgcgcacgctgcccaacatccgcgaactgcgcatcgacgagctcggcgacgtctccctgcgcgacgtcgatgtggccgatctgctcggccgcgaagagatcgtgctcaacacgcgcacggtttcgggttacatcgccggcgaaacggtgctcgtcaccggcggcggcggttcgatcggcagcgagctcgcccgccagctctgcaaggttgcacccgcgcgcatcgtcatcttcgacatctacgagaacgatgcctacatgctcagaaacgagctccttgccgaatacgacgatatcgagatcgatatcgaaatcggaagcgtgtgcgatgtagcgcgcatcaacgaggtgttcgcgaagtaccgccccggagcggtgttccacgcagccgcccacaagcacgtgccgctcatggagatatgcccgcgcgaagccatgcagaacaacgtgttcggcacgctaaacgcagtgcgtgcggccgatgcctacggggttggcaggttcatcttcatctcaaccgataaggcagtgaacccgacgtcggtcatgggggctaccaaacgccttggggaaatggtcgtccagtactacgcccgaacttcgaagaccgtgttctcggcggttcgcttcggcaacgtgctcggttccaacggcagcgtcattcccgtgttcaagcgccagatcgccgcaggcggcccggtgacggttacccatcccgatatcgagcgctacttcatgaccatccccgaagcctcgcgtctcgtcatccaggcgggcggcctcgccaagggcggcgagatcttcatcctcgacatgggcgagccggtgaagatcgtcgaattggcgaaaagcctcatccagctttcggggcttacgcccgatgcggatatcgagatcacgttcacggggctgcgcgagggcgagaagctctacgaagagcttttgatggacgaggagtccacgcttccaaccacgaactcgtcgatcatggtttcgacggggcaggagatcagctacgacgaggtggctgcgaagcttgatgagatcgaggccgccatcgccaagaccgacgaagaggccatcgcgattctcgaagaagccgttcccacctacacccacacgacgaaccgaagctaggctgttcggggttgccgagcggccccggtcggttcggggcgggaaaggagcgcgtgccgccgagctttgcttgcagcgcctgatttaaccttgatgttcgaggtcatggtatgttaccgaatagtgacttttcgcgaacgagttcatggtttccttgcaaagcgcggtttgtttcccttaggatagacggcacgaaacacagagatcgtacgcatgagccaaggagcagacatgtcgataaaagcgggaatcgttggggcggccggattcgccggcatcgagcttgtgcggattctgaccgagcaccccatcttcgagctgagcgtcgtaacctccgattctttggccggcacgccggtaaccgatctgtaccccgcgcttctgggccataccgatcttgctttcgaaccgcacggactcgatgcgctggccgaatgcgatgcggtctttttggcggtgccccacaccgcagccatgtcccaggtacccgcgcttctcgaggcgggcatttccgtgttcgatctgtcggccgattaccggcttaaagacgccgatgtctacgagcgttggtatgcgaccaggcatacgtcgccggggctgttggaaaaggccgcattcggcttgcccgagcttttcgcctcggatctggtccgcgcggcgggcgagcggaaggcggggcacccggcgctcgttgcgtgcgccgggtgctatccgaccgccacatcgcttgcggcggctcctgccgttcgcgcgcgcctcgtctcggggacggtcatcgtcgatgccgtttcgggtgtcacgggcgccggcaagaaggccacggagcgcactcatttctgcttcgcgaacgagagcgtcgaagcatacggcgtcggcacgcatcggcatacgcccgagatcgagcagatcctcggactgcccggccgcatcgtgttcacgccgcatctggctccgctcaaccgcggcattctgtctacggtgtatctgccgcttgacgccgaacacgcgaaaggttcgagcatcgaggatatccatgccctctacgaagggttctacgcggatgacggcttcgtgcaggtgcttccgatcggctccatgccgaaaacgggctcggtggcgggcagcaattcgtgccatatcgggcttgcgctttcgcaggcgggcgatatgctcatcgccgtcagcgcgatcgacaacctgtgcaaaggagcggccggtcaggccgttcagtgcgcgaacatcgtattcggactacccgaggcgacggggctttccgcttcggcgctgccggtttgattctgcgagaggaagcattatggaacaaggatgcatacggcttgcgccgccgcccggccttgaggctgtcgaggggggtggcgtcacgagcgcacgcgggttcagggcgtgcggcatgcatgcgggcattcggaagaatcgcaacgagctcgacctggctctcgtcgcagccgatgaaccgtgcgccgctgcgggcatgttcacccaaaacgtattctgctcggctccggtgatcgtgtcgcgcgagcatctcgacgacgtgtcgtacgggatggcccgtgcggtgctcgtcaattccggcaatgccaatgcggcaacgggaagcatcggcctcgaggcggctcgcgaaacggcaagcatggcggctgaagaaataggctgtcccgaagacgaggtgctcgttgcttcgacgggcgtgatcggcgtccatctgcccatcgcgccgttcgaggagcacctgcccgatgtggtgggctccctgtccgtttcgggcggccacgatgccgccgccgccatcatgacgaccgatacgtttcccaaagagtacgccgtgacctacgagagcgaagcggagggcttttcgggcatgcgcgttacgatcggcggcatggcgaagggctcgggcatgatcatgccgaatatggcgacgatgatctcggtgctcacaaccgacgctccgcttgcgcccgaagacgcgtaccgcgcgctgcgaaaggccgtttcggcgagcttcaacaaagtcaccgtcgattccgatacgtcgaccaacgattcgtgctacctgttggccagcggcaaagccgtcggtgctccgaccgagccgatcgaaggagctgctttcgacgagttcacccgagcgctcacgcacgtttgctcgacgcttgcccgcgatttggcaagcgatggggaaggggcgacccgtctgatcaccgtgcaggtcacaggtgccgccgacgatgccgacgccgataccgccgcgcgagccgttgcgaactccccgctcgtgaagacggcggttttcgggcacgacgccaattggggccgcatcgcgatggctatcggcaaatcgggcgcggcgtttcgccaggaagatgtttccatcgacatcatgggtcttgccgtatgcaggaagggcttgaccgtcgatttcgacgaagacgaggcgctcaggcgttttgagaatcccgagatcgtcctttcggtcgacctcggtgcaggtgagggagccgcaaccgtatggacatgcgacctcacgcatgattacgttacgatcaatggagattatcgaacatgaagtacgcaaaggatactcgtcccaaacccgtatcgagcaggaccgcagaggttctcgtcgaggcgctgccctggatcaagaacatcaccggaaaaaccgttgtcatcaagtacggcggatcggcgatggtcgatggccggttgcgtaccgacgtcatgaacgacatcgtgctcttgaagatcatcggcgtcaatccggtcatcatccacgggggcggcctggccatcaccgatgccatgaacaagttcaacatccccgtcgaattcaaagacgggcagcgcgtgaccaccgacgaggcgatggaggtcgtgcgcatggtgctcatggggaaggtgaaccaggaactcgtcgaggcgatgaacgagcatggaaaccttgccgtgggcgtaagcggatccgacgcgggtacgatcatggccgagcagaaatcacccgaactcggacgggtgggacgcatttcgcgcataaactcgggctacctcgaagatctcatcgatgccgactacattcccgtcgtcgcctcgatcgcgatgggcgaagaggggggttactacaacgtgaacgccgatctggttgcagggcacatcgctgccgccatcggagctcataagatcgtgttcctcaccgatgtcgacgggctctacgaggatttcgacaacaaggattccctgatatcgaacctcacgatgttcgaggcgcagtatatggtcgagaacagcgttgtgtccacgggcatgatcccgaagctccagtcgtgcatcgccgcgcttgatgcgggcgtgtttcgggcgcatatcatcaacggtacgaccccccacgcgctgctgctcgagctgttgacgaacaccggagtgggaacgacgctgcacagcaccgaggaatcgtgcacgttcgacgcccacccgctcggcaatttcgcgtcgaagctgattgagaaccgacagcgtccgatcctcatgggcgatccccgcactccgtagcggtgctgcaggatcgcacggtgtttgcgggcaagcgctttcgggcgtgtgagtaacaacggattattcggaagttttcggaagaaggttgatggcgatgagcctggcagagcaaatggcactcgaatcctcgtatcttatgggcacctacgcccgcaagcccgtggagctggtgcgcggcgagggcatgcgcgtattcgacgacgagggccgcgcgtatctcgatttcgtgtcgggcgtgggcgctgtgagcctcgggcattgccatcccgccgtcgtcgaagcggtttctgcgcaggcttcacagctcatccacgtgagcaactactactacatcgagggccgcgggcaggtcggcgggcttctgtccgggcttctcaacgcatgcatcgacccaagcgagcgcgcttcgtggaagagcttcttcgccaactcgggggcggaagccaacgaatgcgccatcaagctcgcccgtctttgggcgaagaaaaacaaaggggaagcccggatcgtcgtaacgctcgacaagggctttcacggaaggacgcttgcgacgcttgccgctacggcgcagccggccaagcaagaggcattcaagccccttcctgcaggattcgtccatacgccgcccaacgacgtctccgccctcgagcagctgttcgcggagcaaggcgacgagatttgcgccatcatgctcgaatgcgtgcagggcgaaagcggcgtgcatccgtgcacttcggagtatttgcgggtggcgcgaaggcttgcaactgagcaccgcgcacttctcatctgcgacgagatccagtgcggcatgtatcgttgcggcacgtatccgttcggattccagcacttcggcattgtgcccgacatcgtaaccattgcaaagggcgtcgcatcgggctttccgaccggcatgtgcgcggcgcgtgaagacgttgccgcggccttcgagcctggcgatcacggttctacgttcggcggcagctgcctcgccgttgcggcggcgaaggcgaccatcgagacgctcgaagcgatcgacgccgggggcaatgccgaagcggtgggcgaatatctgcgcacacgtttggccgagctgccccacgttgtcgaagtgcgcggcttgggccttatgtgcgcatgcgatttcgacgagacgatcgatgcgggcgagcttgtgatccgcgggctgggcgaaggactgctccttaacagcacgggacttcggacgctgcgctttctgcccccgctggtgtgttcgagggatgatgtggaagcgttggccgagggactgaagaggctgttggcgtagcggtgcgagcgaacgctttgccgatgcgctggctgcagggccgcgaaagctcttggcatagcgctggcgcgcatccgatggatgcgctcggcaaaggcgaaaggcgccctgccaagaaacttatgcatcttttgaaattcttatcgcactggcggcttttttacgttaagataacctgcataaatcacgaaggtatttgcatatttatgcatacgtccgtgtaagaaggtagaccgtatgtgttttactgctcgagtgaaggactgaaagcgcctacatgaggaagcggcaacagaggcatgacgtaattcgcgacatcattcgcgagtacagcgtcaaaacacagcgtgatctggccgaacagcttcaagctgccgggtatgattgcactcaagccactatatcccgcgatatcatggacatggggctcgtcaagtcgagggaaggattttatgttcttcctgaagagatgcggttgcaacgtatggtctcggaattggtcgaggaagtacacttagccggtaatatggttgttgtaaagacatactcaggtggtgcagcgggcgtatcagccgcgcttgacaaggcgagccttaaaggcgccttgggcaccgttgccggcgacaacacgatcatgattgctacggcaacccccgaagctgcttcggatgttgcgggagcaatcaaccgactgcgacgacgttagtcgtctattttcttttggggacgtaggcgtccccccactcatccccgctctacatttgtgagcccgaccaaggcctgagcctgcccggtcggcggcgatccgcgcaaagcgaaccgctgcatgcaaacccgtgtgcttgtgcgcgaaatgctaaaactccgaaagagcggcccgccgcaaaggcgtcttcggctcgacaaacacagtgaaaagccagcaaggaaggaatcagaacaatggctaaggataaagttgtacttgcgtattcgggtgggctcgacacgtcggtgtgcctcaagtggcttcaggacgagaagaacctcgatgtcatcgcggtggtcggcgatgtggggcaggagcacgacgggctcgagcagatcaaacagaaggccctcgatctgggcgtgctcgattgccaggtcgtcgatatgaggcagacgttcgtcgacgattacttgagcaaggcgctctacgcgaacgccatgtacgagaacaagtacccgctcgtttccgctctctcaaggcccgcgatctccaagcatctcgtggatgccgcccataagtacggcgccaaatacattgcccatggatgcaccggcaagggcaacgaccaggtgagattcgaggcttccatcatgatgctcgatccttcgatcgaaatcatcgccccggtgagggaatgggatctcaagacgcggccggaagaaatcgactgggcgaaggcccacggcgtgcccgtgcccgcgaccaaggacaacccgtactccatcgacgacaacctgtggggccgggcaatcgaatgcggcgtcctcgaagacccgtggtgcgagcccccttcggacatctacaccatgacggtcgatcccgccgatgctcccgacgagcccgagtacgtcgagatcaagttctccaagggcatcccgtattccctcaacgataagcagatgagcttcctcggcatcatcctcgagctcaataagatcgccggttcccacggtttcggcagaatcgacatgatcgagaacaggctcgtcggcgtgaagagcagggaatgctacgaggttcccggcgcgcttgcgctcatcgaggctcacaaggcccttgaagacctgtgtttggagcgggaggttctgcactacaagctcggtatcgagcagagctgggcgaacgccgtgtacaacggcctgtggttctcgcccctcaaagaagccctcgacgcgtttctcgcctccacgcagcagtgcctttcggggacggtcaaggtgaagttcttcaagggttcctgcacggttgtggggcggaagagctcttattcactgtacgactacgcgcttgccacttacgacgccgatgacgcattcgaccacggcgctgccaagggcttcatcgacctgcacacgctttctgctaagacctgggcttccaaccggaggcaggaaggcgcttctgccgatgtgctcagcgccgagaaagcgcagggtccgctgaagaagggcaagtacgagacggtacccgagatagccgaaggcgatgattgctcagacatcgtcgaagaggctgagcaggccatgtacggcgccgcggtgaaggcatagggccgaacgcggtctgaaaggagaaggcaaatggcattgtggtcgggaagattcgagcagggagtcgatgcgttcacgcagcgcttcggcgcatcgctgccaatcgataaggcgatgtacaaacaggatatcgctggctcccgagcccatgcgaacatgcttgcagcgcagggcgtgatcgcgacggacgatgccgcggcgatcggcaaagggcttgagaagatcgagcgttcgatcgatgcgggggagttcgccttcgatatcaacgacgaggacatccatatggcggtcgagaaggctctgacggccgatataggcgatgcgggcgcccgcctccatacggggcgttcgcgtaacgaccaggttgctacggacgcgcgtttgttcgccaaagaactctgttccgaactcatggcgcacaacgtatcgttgcgtcgcgcgcttgtggcgaaagccgaagagcacttcggtaccgttatgccgggctacactcatatgcagcatgctcagccagtgcttttctcccatcatatgcttgcgtacttttggatgctcacccgtgatcacgttcgcctgaaggccgccttcgacgcggctgatgtgagtccgctcggctctgcggcgcttgccggcaccacctatccgctcgatcgtgcgatgacggctgccgaactcggctttgcgggcatgaccgaaaactcgctcgatgcggtgtccgatcgcgattttctgctcgatctcgattacgcctgcgcggtgtcgatgatgcacctgtcgcgtttgtgcgaggagatcatcctgtggtcgtcttccgagttcgggttcgtcacgctttccgacaaatactccaccggctcgtcgatcatgccgcagaagaagaaccccgacttcgcggagcttattcgcggcaagaccggacgtgtggtaggggatctggtcggtctgctcgtcacgatgaaggcgctgccgcttgcctacaacaaggaccttcaggaagacaaggggggcgcgatcgatgcggcccatacgcttgccgattgcctggtgtgcatggacggcatgatcgagaccatgcgcgtgaacgaaggtgcgatgctcgagcaggccaagaagggattccttgccgcaaccgatgtggctgattacctggccaaaaagggcatgccgtttcgcgctgcccatgaggttgtcggcaatctggtgctgttgtgcgaaaagcgcggttgcgacctcgatgatctgactctcgatgatttcaaggccgcaagcgagcttttcgatgacgatatcgtttccgagctcgatctcgagagcatcgtcgaagctcgcaccacctacggcggcaccggccacgaagcggtgcgcgtccagctcgaacgggcccacggggttctcgagcgggacgaacaactccacggataagccctccgagggcataaccgcatgacagggacggcccgcacgcattgcgcgtgcgggccgtcgccgttgtgcggcgggagcgcttcgggtttccgcaagcggcttcgcaaaggccgcttctgtacctcttgcggtgtagggaaggctgaagttcctgcgcaccctgtggccttttttcaacaaacttatgtactttcataagcccatgaggcctgatggtaaaatgggcgaagttttttggaggtgacccgtggcttctcgctctatcaagaacaggcccgatgtaaaaaagaagaacaaatgggcggcgccgttggcggtgcttgccgttttcattgccgtcgtcgccgcaggcgtgggcggtgtttgggcgctcggcgaatcgtggttgcaagatcttcccgagtacaagaacgtcgatcagttcaataccgcacgcaagacgacggtgtacgccaacgatcgtacgaccgttctcgccgagttctaccttgaggaccgcgaaccggtggagatcgatcagatcagccagtacgtgctcgaaggtacggtggcaaccgaggacgaacgcttctacgagcatggcggattcgatttgtggggcatcgcccgcgccgtcgtcgtgaacctgacgggttcgtcgcgcgaaggcgcatcgaccatcacgcagcagttcgtgcgcaatacgatcctttcggccgaggcgaacgacatctcgatcaagcgcaaagtgcgcgagatgtatctgtcgatgaagatcgaagaggtgtacagcaaagacgaaatcctgctcatgtacctcaacacgatcaattacggatcgggcgcctacggtatcgaggccgcagcgcagcgatacttttcgaagagtgcggccgatctgacgcttgtggaagcggctacgctcatcggcattccccagtcgcctacttacaacaaccccatcgactatcccgacgcctgccaggatcggcgcaacctcgtactgaaccgcatgctgacgaatggatacattacgcaggcggaatacgacgaggccgtgaacactcccctcgaactcaacgtgaccgagcgctcgaacgatggtatttacaagtatccttacttcaccagctatgtgcgcgaatacctgttggaacagtactccacgtcggagatcttcgaaggcggatggaccgtgtacaccacgatcgacccgactttgcaggatgaggccgaagcggcagcccaggcgaagcgcgatacgcttgccgacaacttcgatgttgccatgacggtggtcgatcccgaaacgggttacgtgaaggccatggtgggcggcagagattactatgcgaaccagtggaacttcgcaacgcaagccgagcggcagccgggctcttcgttcaaaacgttcacgctgatcgccgccttggaagcgggcatcagtcctcagaccatggttgattgctccacgaccatgacggtagacggtgccaagatatcgaacatctacaacatcaattacggcacccggagcattgcacgcgcgtttgccgtatcatcgaacaccggcttcgtgagactctctaaatcgcttggtcctgaaaaggtggccgaggttgccgagcgcatgggcatctcaagcgaattgcgcccggtcgcaacccttactttgggaacaagcgaagtgacgaccatcgatatggccgaggcgtacggagctatcgccaacggcggagtgaagcatgacgcaatcggcgtcgagcagattctcgatcgcaacggcaacgtgatcgaagaccattcaaccgattcgggcgaacgggtgataacgcccgaagtcgcctctgctgcaacgcaggtcatgcaaggcgtcatcaacacgtcggagggcaccggcactcgcgctgcgctcgcttccggacagcctgttgccggcaagacgggaacatcggataactattcggatatctggttctgcgggtttacgccgcagctttccgtcgctatttggatcggcgatccccgctcgatcaccgagggaagggaatcgctgtcaagcgacgagacggcgaccacggtgttccgcgatttcatgaccgcggcgcttgaggggcagccgatcgagcagttcaaaactgcatcggctccgccgtacaagacctacaccgactccaagtggaacatcggcggctcgtcgaacagttcgagcgatgatgaggacgaagaggcgaagaagaaggccgaagaagacgcgaagaaaaaacaggaagaggaggacgccaagaagaacgaggaggacgacaagaaggatcccgagccggctcccgaccctgagccgacgcccgatcccgagcccgagccgactccgacgcccgatcccgatcctccggtcaatccgagcagcggcgccgccaagcccgcttcgtatcggtcgatcgataccgccacgcaggccctggggtcaatgaatttcgcatggccatcgtatgcggtccgtaacgattggatttcagagttgtcatcgggcaacggaatttcttttcgtacaataagcttatcaacagcgtaacgcgcagtttcgatttgaaaggcactcatgaaacgaacgaacctcattagacttctggccgtagcgctcatgggcgcgttgcttgcgatggctttgggcggctgcatggcccagaacaataccggcaacacccagcaagcggaaaaccgtcagtacatgtctcaggtgaaccaggttatggaagatttggccaatcgccttgacggctttaaccaagccgtttcgaacggcgatttggtcggcatgaaaaaccagtccgacaacgcgttcaaagccattgacgatctgaatgcgctcgaggcgcctgaggagctgaaagacattcagacggcatacgtcgatggctgcaacgatctgagggacgcgctgagccagtacatcgatctgtataccgaaatggagaacgcgaccgaagaagaaccgttcgactacacggcgtacgattcgcgcctcaaggagatccagaacaaatacgatagcggaatcgataagctcgaagagggcgataagctggcgaacgacaaggataactagattcccgggtttaccgggtgaaccgtgatagataaaatcgaagcgacctccgaggggtcgcttctttgcggttgggccctggaatcgggaggtctcgggggtttcctgccatcgccatcgcccgccttgatgccctgcgttctctattcgccttctatccttcggggcccgggccgagggataagtggagccgtaccgtaccgtcaatgacctcctggctgatgacgatgcctttcggtacggttgccgagtattcttccacgtattcggcgttgaatccggcgagggccgaggcggcttggtcgagcgtcatgcccacgacgttcgggggagttgcgggtttgttcgcctcttcctgcctgcgcttctcatcttcctccgcctgctgtttcttctttgcttcttcctcttcctttttcttcttttcggcctcttcctttttgcccgcttcggtctctttgtagagcttgtcattctgctctttgttgaacttgttgtcgtaggtggggtcggctgcaggcgcgaagtcttggatttcatagccttcaagcgccatattcatgaagtcctgccagatagcgttgcaggacaggttttggttgcccggctggttgaaatcgggattgccgatccagatggcgcaggagagctggggcgtgtacccgacgagccagtggtctttgaagtcgtcggacgttcccgttttacctgcgaccggttgtccgttgtacggcatgtagcctgctgcggttccgtcgccttgcgtaaataccgttttgagaaccttggtaaccgcgtaagcggtttcttccgaaatgacacgctcgccttcggtgtcgctggtgtcgatttcggttccgttgcggtcgagaatctgcgttatgggctcgggggtgtgcttgatgccccctgtggcgaaggttccgtaggcgctcgccatctcaagcgacgtgacgtttcccacgccgagcgtcgtggtgagtacttcgggttgcgttgtggttatgccgaggcgatacgctgcttctgccgcagcgctcggggtgaccttttgaaccagccggatgtagcccgtgttcgacgagacggcggttgcgctttggatggatctgatcccgtaattgatgtttccgtagttttcgaaggtatcggcgccgactttgtagggcgaagtgcaatcaatgagcgtcgaggggttgatgccctgctctatcgccgcggttaacgtgaacggcttgaacgacgatccggcgggcctgccgccctgggttgcgagattccattcgttggcattgtaatccttgccgcccaccatggccaaaacgtagcccgtattcggatcgatgcaggtgagcgacacctcgtcctcctcggccatgcgcgcgtattggttttcgcatgcgagctcggccttggcctgaaggccgggatcgatcgtggtgtacacggtgaggccgcctttgaacacttcggcttgggagtactcttcgagcaaggtttggcgcacgtagctggtgaaatacgggtaggcgtagatgccgtcgttcgagcgcgggggagcgggatcgagcacgagctcctgcgcgactgcttcatcgtattcttcctgtgctatgtggcctgcggcaagcatccggccaagcacgagattgcgcctgtcgcggcaggcgtcgggattggttttcgggttgaggtaggtgggcgattgggggatgcctatgagcgtcgcggcttccacgagcgtcaggtcaatcgccgatttctggaaatagttcttcgcggcggcttctatgccgtagcagccgtcgccgtagttgatcgtgttgaggtacatgagcaggatctcgtctttggagtatgcctcttcgagctgcgttgcaagctctgcctcgcggatcttgcgcttgaacgagatgtcggtcgcctctttggaaagcagggtgtttcgcacgaactgctgcgtgatggtggaggctccctcgagcgcgcctccccgcaggttgttgagaagcgcgcgggcgatgccctgtaggtcgacgccgttgtgctcgtagaagcgcacgtcttcggtatctacggttccctggagcacgtaggggctgatctggtcgattgcaaccggctcgcggttctcgacgaagaactcggccagcagggtttctccgtcgttggcgtagacgcgcgttttctcggcgaagttgaacgcatcggaatcttcgatgctgggaaggtcttccagccaggagttcataaccccgagggcgccctgtacgcccccgtaggcaacgaagcaaacggcaaccagggcgatgccgagcgcccacttggtcgcatgggagtgaacctcgcgctgtttccttcggttcttcatgtgaacactatactagaaagcggcgcatttgtgagtcttctcggagctttctgctttatttgggcgggggaggcgcgggggcggcccattcgctatcatgtgcggtatacatgaacaggatgaggcgggcggtctttgaatcaggggctgccggtcgtggaaatgcgaacacggatggatatgagcgatatgcaacatgaaccgtttggggcgcgccccgaattgttagcccctgcgggaaatgccgaatgccttcatgcggcggtttgcgcgggagccgatgcggtgtacctgggggtcgaatctttcaatgcgcggcggggcgccgataattttacgctcgaaacgctggcctctgcctgcgattacgcgcacctgcgcggcgtgtcggcgtatttgaccctcaatacggcgatcttgccgaacgaggccgacgaggcgatggagcttgcccggcaggcgtatcgagtcgggatcgatgctttcatcgtgcaggacatcggcatcgcggcggaactcggccgaacgctgcccgaagcgcgggtccatatatcgacccagatgaacacgcattcggctgcaggcatcgaagctgtggcggctctcggggcgaagcgggtcaccctcgcgcgcgagcttgcgtgcgaagaggtcgaacgactgactgcgcttgccgcccagaggggaatggaaaccgagacgttcgtccatggggcgctatgcgtgtgctactcgggccagtgcttcatgtcgtcgatgatcgggggcagatctgcgaacagggggttatgcgcccaggcgtgccgtcttccgtatacgctgcacaacaaggcactgcggaaaacgcttgatgctccaggcgagcatttgctttctccgaaagacctgtgcgcgatcgagcttttgccgatgctcgtgcaggcgggcgtagcatcgctgaaaatcgaggggcgcatgaaatcggccgagtacgtgtacgcggtcgtttcggtgtaccgccgcgcccttgacgaagtgctggcggatcggcagcgcttcgaagctcgggaaaaggccgcttccgatgcgcagccggtcggggagctttccgttgttcgctatgaggcgtcggcaggggattcccaaacgctcgccgaggcgttttcgcgaggattcacaaccgcgtatctcgaagggcggcgcggcaacgacataatgagctacggtcgcccgaacaacaggggtgtgttcatcggacgcgtgacgcaggcgcgcgacggttcggtcgagatagcggccgaggacgagatcgtcgaaggcgacgtgctcgaattctggaccaacaaggggcatttcgcctatccggtcgagcgcatcgagcccgcgaaaggcggcgttgttcgcgtgcctttgacgaagaaggtgggcaagggcgatcgcgtctttcgcgtgagaagcgccgctgcgaaatttgccgacgatgcgaacgagccgcgcatccccgtttcgggaagcgtttctctgcgcatcgggaaaccgctcgccatgcggttttcctcgggcggattctcttccgaactcgagggggccgtggtggaggccgcccgcacgaaatccgtctccgaagaggaggtccgcgagcatgtcgatcggctgggcaaccttccctttgagcttgtcgatcttgaggtcgatgtggacgaaggcgtgggggtcggtttttcccagctgcacaagctacgcacgcgagcgctcaagcagctcgaggaagcgatgctcgagcggtaccgtgagcggaagcttccgcgcatcgaaagccgatcttcgaagccgccttatcgctccaatcgctgcgatgtcgccgtgttcgccaccaatcccgcgtgcgcccgagctgcgaagcgggcgggcgccgatctcatctttgttcccgcgttgaactacaagcgcggcgaggccgttatcgccggtcaggtttcgggcactgccgagcaggcggggtacccgaagcaggttgccatagctctgccgaccgtcgaccacgatctgtccgaccaatcgcgcgaaggggtcgtcgggttcgacccgtggtcgtacgtgaagccgggaaagcccgtgctcgccgagaatctcgggcagcttgctcgggcggccgagctcggttccgtcgtcgaagcgggtccccatatcccgcttctcaaccgattggctctcgaatcggcagccgagctgggtgcgaagcgggtctggctctcgccggagctttcgctgcaccagatcgaagcgctcggcaaggattctcccgtacctttaggtcttaccatcatgggatcccaggagttgatggtgaccgagcattgccttttgatgagccaaggcccctgcagcgaggaatgcgcttcgtgcgcccgcaggaaaagccctcactatctgaaagaccgcaagggctacgagtttcccgttgtaaccgattgctgcgggcgcagccatctctacaacgcggtttccctcgacgtcgcgcatgccgttcccgacctcatcgatgcgggcgtgtccgccgtcatggtggataccgcgcttatgaacgtggaggaaacgaccaaggccgtccagcgggcggtgcgcgcccgagatatcgccctttcgggaggcaatcgcgtcgcgaaggcgggagatgtaacgagcggccatttgttccgaggcgtcaagtaaggcattcgcgttctgtttcggcggtcggctgcgggaccgtttcgcggcacgcttgccggcgcgacggccgacctcgcagcgggctcgccgcatttgccggggtggctttgcgtgcgctcgctggcaaaacgaagcgaaacgcagccgcatgtgctaccataacaaaccatcgtgcgaccgagctcgtgcggatagggaaaccggtattgaaggagatgagttcgataacccccgaagagcagctgcatatcatccagtcgggtactgcgcagatcgtgcccgaaagcgccctgttggaaaagctcaagaagggcaagagcctcaacgtgaagctgggcgtcgatccgacggcccccgacattcacctcgggcatgccgtgcccttgcgcaaactgcgtgcgtttcaggatctgggccatcgcgtaacgctcatcatcggcgacggcacggctctcatcggcgatccgtcaggacgcaattcgactcgtccccagctgacgtccgaacaggttaaggcgaacgcccagacatatgtcgaccaggcgttcaagatcctcgatcccgagaagacgacgctcgagtacaactcgaagtggcttctgtcgctcgatatggagggcctgctcgctcttgcctcgaatttcaccgtcgcgcgcattctcgagcgcgacgacttccataatcgctacacctcgaaccaacctatcagcctccatgaattcctgtatccgatcatgcaggcgtatgactcggtggttatcgatgccgacgtcgagataggcggcaccgaccagctcttcaacttgcttgcgggccgcgaactcatggagaagaagggcatggagccccaggtgtgcctgacgcttcctcttttggagggaaccgacggcgttcagaagatgtcgaagagctacggcaactacatcgggctcaccgacgagcccgccgatatgttcggcaaggtcatgtcgatacccgacgagctcatggtcaagtactaccgcctcgcatcgacctgttcggtcgacgaggtcgatgagatcgagcggggccttgccgccgatgagctgcatcccaacaaagtgaagcgcgcgctcgcccgcaacatcgtgaccgcctactacgatgaagctgcggccgaagccgccgaagggcagttcgaccgcgtattcaaacagcactagatgcccgacgacatcccggaatacgaagcggatctgactccgaacgacaagggtctcgtctatctggccaagctgcttgccgatacggggcttgcggcttcggccggcgaggcgcgccgtctcatcgacgggggaggcgtgaaggtcaacggcgaaccggttgccgcgaaaagctacaacgtggcacccgacatgcttgcgggagccgtgcttcaggtgggtaagcggaagttcgtcaagctggtgtagcaggcggtcggacagacggttttcgattcggggccttgcggggtcccgatttttttttaaaaaacttgcaaggatttcttccttctaatcgttttgttagtgtgaagacgagaaaaggagcatcagtatgagtaagaaaaagatggtcgcagtattcgcaggtgcgcttgtcgttgcgctcgctttgccgacggcggcgcttgccgcacctgggggcggcttcggccagctgttcgcatcgtgtcagggccaaggcctcggaatggcgatcatgcgcagccaggcgacggttgatcaggcatgcgggcgcgccttcgtcgacgccgacggcgatggcgtgtgcgacaattttggaaacggccgctgcgcgggctacgtcgatgccgacggcgacggcgtgtgcgatgcgtgcggagccgaagcgaattcgtgcaaaggctacgtcgacgccgacggcgatggcgtgtgcgacaactacgcggcgggcaacggctgcggacgcggcttcgtcgatgaaaacggcgatggcgtgtgcgacaatggcggtcggggcggatgcggtgcaggtgtcggccagggcgccggatccgggtacggcggcaggcaccataggttctaggtgctgctcggcgagatgcgcagccggtctgccggtcggttgcgcggtgacgaaacgggataaaagcgaacgggcatgagggaaagaaccgatatagagcgggccatcgaggagcacggcgacaccgtgtggcgcgtgtgcgtcctttacttccggcaaagtcccgatgcccaggacgcgtttcaagagacgatgatcaagtacgcctcgttcgatgggttgttttccgatgccgagcatcggaaagcttggctcatccgcgttgcgaccaatgtgtgcaaagacatgctgaaggcagctcaccgaacgaagtccgttctcgatgacggcacgatcgccgccgcggctgcctcgcatgacgaatcgctgcagccgggctcggcatcgggcgaggtgctcgatgccatgctcgccctcgccgattcgccgcgaacccccgtttacctcgctttgtacgaaggctattcggctcccgagatatcggagatgctcgatgcgcccgtaaacaccgtgtattcgtggatctcccgagggaagaagcttttgaaggaggcgctcgcatgaatgattgggaaaacagggtccgcgaggccttcgacgaggtcgtgcttcccgattcggttaaggagcgaacgctgcaggccgtcgatgccctctcggccgagcctgccgtcagtgcttccgaagcggttttcgccgccgcgcggcgctcccgcgctccgcgcactcgtcgatgggcgttcgcgcttgcggcatgtctcgcgctctgcgccatcgggttcggcggcttctctacttttgccagcgagacggctcaggtgggcatcgacgttaatccgtcgatcgagctcggcctcaatcggttcgattgcgttgtagccgcgcgacccctcaacgaagacggagcgcagctgctcgaaggcatcgatcttttcggaaagagctacgatgacgcgatggccgcattgacgggaagcgagctgttcttatcctacgtcggcgatgacggctacgtcgaaatcagcgtcagctcggccgacgagggtcaggccgaagcgcttgccgagaaaagcgatgcctgtctcgagtctttgccatgccatggaagctgccaaacggtctcagcggaaaaccgcgaagaggcgcgggcggccggtatgggcgtgggccgctacaacgccgcccgagagctcatggagctcgattcgagcgttacgcttgaagagtgccgtacgatgacgatgcgcgagctgcgagagaaaatcgccgctgcaggcgggaactcgagcggaagcccttccggggaaacgggagcccatcacggaagacaatcgggcggcgcggggcaggggatgcacggtcgcggcgccggtcgcggcggcgattcgtcagaatagccgccgcggatacgcgtctacagcgcgagcttgctgaacgatttgagcgcggtcttcgtttcgtcgtcgagctctttgacggcaatccccagcacggcgccttcgagcgcgtaaagccagttgatcgacgttgccggattcttctttttcagcagagcccatgaggcgcggctgcccttttccttcaatgcttcagcggtggggatgcccacgtccgcgaggcgggctgcaagggcttttccgatgcccggaaggttctcgagcggcgtttgcgcggccgccgtcttcggggcgggcttgcgaccgcggcggcggccgggctgtgtcgcggcatcgtcggcggcgggagctgtatcggcagcggtcggggcctcgtcggtaacgatggcctcggtcgcaggtgcctgcttctgcctcgcccgctttgttcgggcgggcttttccgcctgctcggtcgccgcatcggcgggctgtccggtttttccgcccgtctcggtttgcgctgcgggcgctgcggctgcgtcacgtgcgggtttcgcttgcggggcacctgcctgcttccgcgaaacgggcctgcggctactccgttgctgaggctttgcctgctctggttcgggttgcggctcggcctgcgccgtcgcttccgccgaggggccggcattgttcccgctcgctggctttgcggccgagcggggcttgcggcgcttgctcgatttgctacgctgcgcgccgttgccgttgcttccgttcgcctgtgcgggctcgctttgcgattcggggaagagcggtgcgccttcgaccgtgtatccgttttcgggttcgtctgaatcggtcgtggcatcgaacaggtttcgaatggtgcgatacattgccgtgccgatgatctgccccgctgtgcgcacgagcgcctcgtggacgtcctggcgcgtttcggctgaaatgagggcgtcgtcgagcatgaattcgtcgattgattttttgagtccgaggaacctgaattcatcggcgtagcggttgagcaggtagtggatggcgggtttgtatccctgatcctgacttacaatgtagccgttttcgatctcgtggcacgcgattctgcggctcagctctgcgatcagctgcacgtcgaggctgtttttgacgccggaatcttggcagagtatccattcgatgcgggcgggggattctttgatggattccttttgcttctgcgacaggttgctttcgcggtggaaaacgacgacgagatcgttttcggtaagcgattcgatgccttgcaggcaggtgttgatgtgattttcgctgtcgatgaagtacgtgcgacgtgccttgcgggcaggttctatttccatgatgactcgtttctctttataccggtaaggcggggatggcttgcgtgcgttcatcgcctgcctcgttgtttcgttataagaagagtagcagaaaacggaaacgcagtacgcacctgcaaagaagacacatcgccatgcgggctttcggcggcatcggccgttgcgcatcgatgatcgctgcatatattagtaaaggatctctgcaggcggttcgggctcgtgcggttgcgcagcgctcgaagatgcggcggcatcgtcgagcgcgcttccccttgcgaggggcctacgcgttggtcggagcgcgcatcaagctgcaggtccgctcgaatgcgggtctccttcttcgcgcgccgccgtgtctatacggccttcagcaaccatgtgaccccgacgatttcatgaagcagctcgtcgtattcgcctttctgggcgtcaaggtagcgctcgaaaagttcgacgtgctcggggtggctcgcttgaagctctgcgacgcgacgggcgatacgatctatctcctcgtcgtaatcggcggcggtatcggttgacgagaggctggcgatcgtctcgaatccggctttgtcgaacatctcgttccaggaggaccgcgtcggatacgatgcgtttggatcgccctcttcggcataggcgtcgtcgagaagcaggtatcctcctgtccgaagcgtctttctcatggttgcgagcatgtccatcggcgcgccgagcgcgggtcccactgctccgtagacagcgcaatcgtactcggattcgagcggcgcttccacggtgatgtctccaacttcgaaagcgcacaggtgcgcgacgccttctcgcgctgccgcctctcgcgcctcttcgacgaattcgggaatggcatcgattcctttgacgcgcattccaaggcggcgggctagggcgacggcgatgactccctttccgcagccgagatcgagcgccgtattgcgctcggatgccgcaacatgttccgacaggagcccgaccatatcgtcgggagagctcccgagctcacagaagtcctgcaggaggtagggcaggaaggggataatgtcgggggtgtccgatgtcatagatgcggcaaggttttgttcggttctcgtatccatgggtatattgtaccgtattacatagttagtcgctttacacaagaatgcagggaggaatttgcagggtctcggcaaggccgttgaggctgtaagaaaaaagcttcattttttatcgatagaccccttgcgttttcttttccgtaggtctaatatattcaacccgcgcttttgaagcgcaggaccgcccaagggcttcggatgattcgaccttttctgggaaatcgaaacgctgagaaataaagttaagatttctaaaaaaaagttcttgactccggtgccaaggggcagtaatatatctccttgcgcgtttgcctccggcgaacacgcgggacggcccggaagggccgccgagaaccttgaaaaccggatactgtgatacgaataagctagtagaacctcgtcagatgcccgcccccagaaaagggctccgggcaccttgacaaaagaccaagattcattcttgattttcgaagacgcgccccttcggggacgctttttgaacggagagtttgatcctggctcaggatgaacgctggcggcgtgcttaacacatgcaagtcgaacgaataacccacctccgggtggttatagagtggcgaacgggtgagtaacacgtgaccaacctacctctcacttcgggataacccagagaaatctgtgctaataccgaatactccggaggccccgcatggggcctccgggaaagctccgacggtgggagatggggtcgcggcctattagatagttggtggggtaacggcctaccaagtcagcgataggtagccgggttgagagaccgatcggccacattgggactgagatacggcccagactcctacgggaggcagcagtggggaattttgcgcaatgggggaaaccctgacgcagcaacgccgcgtgcgggatgacggccttcgggttgtaaaccgctttcagcagggaagaaattgacggtacctgcagaagaagctccggctaactacgtgccagcagccgcggtaatacgtagggagcaagcgttatccggatttattgggcgtaaagcgcgcgtaggcggcctgttaagcggaatctctaatctgagggctcaacccccagccggattccgaactggcaggctcgagtttggtagaggaagatggaattcccagtgtagcggtgaaatgcgcagatattgggaagaacaccgatggcgaaggcagtcttctgggccaacactgacgctgaggtgcgaaagcgtggggagcaaacaggattagataccctggtagtccacgccgtaaacgatgggcactaggtgtggggaggagtacctttccgtgccgcagctaacgcattaagtgccccgcctggggagtacggccgcaaggctaaaactcaaaggaattgacgggggcccgcacaagcagcggagcatgtggcttaattcgaagcaacgcgaagaaccttaccagggcttgacattcaggtgaagccggggaaacccggtggccgaaaggagcctgaacaggtggtgcatggctgtcgtcagctcgtgtcgtgagatgttgggttaagtcccgcaacgagcgcaacccctgtcgtatgttgccagcattcagttggggactcatacgagactgccggcgtcaagccggaggaaggtggggacgacgtcaagtcatcatgccctttatgtcctgggctgcacacgtgctacaatggccggtacaacgggctgcgaacccgcgagggcgagcgaatcccttaaaaccggtcccagttcggattggaggctgcaattcgcctccatgaagtcggagttgctagtaatcgcggatcagcatgccgcggtgaatacgttcccgggccttgtacacaccgcccgtcacaccacccgagttgtctgcacccgaagtcgacggcctaacccgcaagggagggagtcgccgaaggtgtggggagtaaggggggtgaagtcgtaacaaggtagccgtaccggaaggtgcggctggatcacctcctttctagggagactaacattagtcaggctcaagtcgagacgactccttgagacctagagattcttatcacagatttgagataggcgctacggcttaggcgtccctcgcagtatccggtttcgaaggctctcggccttcggggagccccctcaggggcgcccgcgcaccttgaaagttgcatagcgtttagtgaatcatcgtcaattcttttttagatttgaagtgattcgcatcacgatcgcgaatgatatttgaaagacccaaatactttatttaagttttgagaagataaagatattaagggcacacggtggatgccttggcataagaagtcgatgaaggacgtgacaagctgcgataagctgcggtgaggtgcaaattacccttgacccgcagatttccgaatgggggaacccagccggggtaatgcccggttactctggcccgaacacatagggccagcagaggcaacccggggaactgaaacatctaagtacccggaggaagagaaatcaaccgagattgcgctagtagcggcgagcgaacgcgcaccagcccaaacccatgcatgtgtaagcttcagggcgttgctgcatgaggtgttgtggggccgtctattctttcaacctgtattgacagacgcagttacaaagcgtcgtggtagcggaacggcatggaaaggccggccagagcgggtaaaagccccgtacgcgaaaccacggcgcctgcgaagacggttcccgagtaatgccggacacgtgaaatccggcatgaatccggggggaccaccctccaaggctaaatactctcttatgaccgatagcgaaccagtaccgtgagggaaaggtgaaaagtaccccgagaggggagtgaaatagtacctgaaaccgtgtgcctacaagcagtcggagcagcgcttgcgctgtgacggcgtgccttttgtagaatgagccagcgagttgcggtgtgcggcgaggttaagttgtgaaacgagccgtagtgaaagcgagcctttaagatggcgcttagtcgtatgctgcagacgcgaagccgagtgagctatccatgggcaggctgaagcgggggtaagaccccgtggagggccgaacccacttcggttgaaaacggaggggatgacctgtggataggagtgaaaggctaatcaaactcggagatatctcgttctccccgaaatagctttagggctagcctcgatcgtttaataccggtggtagagcactggatcttctagggggcttcaccgcctaccgaaaagaaccaaactccgaatgccggtattccagagatcgggagtcagaatatgtgggctaagctgtgtattcgaaagggaaacagcccagaccgcctgctaaggtccctaaatccatgctaagtggcaaaggatgtgcgtttgcctagacaaccaggatgttggcttagaagcagccatgcatttaaagagtgcgtaatagctcactggtcaagtggacatgcgccgacaattcacggggctaagcatggtaccgaagcagcggactgaattatttcagtggtaggggagctttccataccgggtcgaagccggagggtaaccgacggtggactgtatggaagtgagaatgctggcatgagtaacgagagaagtgcgagaaacacttccgccgtaagcctaagggttcctgggcaaggctaatcctcccagggtcagtcgggagctaaggcgaggccgcgaggcgtagccgatgcacaacaggttgatattcctgtaccaccaacgagcgttaccaccgatggggtgacggagaagggtagctgggcggggttctggacgtccccgtgaaagcgcgtagggcgatgcgtaggaaaatccgcgcgtcatgtgcctgagacgttagacgaagcaattgagtgaagtcagtgagcccatgcttccaagaaaaacctctagggagctacgttggtgcccgtaccaaaaccgacacaggtaggcgggtagaacataccaaggcgatcgggagaactatggttaaggaactcggcatattgactccgtaacttcgggagaaggagtgcccctgacggtgaaggaccccgcgtccggagctatcgggggtcgcagtgaaacggcccaagcgactgtttatcaaaaacacaggactctgctaagtcgtaagacgacgtatagggtctgacgcctgcccggtgttggaaggttacgtggatgggttagcgcaagcgaagctctgaaactaagccccagtaaacggcggccgtaactataacggtcctaaggtagcgaaattccttgtcgggtaagttccgacctgcacgaatggcgtaacgatttgggcgctgtctcaaccatagacccggtgaaattgtattattcgtgaagatgcgaattacctgcggaaggacggaaagaccccgtgaacctttactgcagcttgacattggttgttggttcggtgtgtagaggataggtgggagacttcgaagcagggacgccagttcctgtggagtcgcccttggaataccaccctcatcgtatcggcaacctaacgtgcgaccgtgatccggcgtgcggaccgtgtcaggtgggtagtttgactggggcggtcgcctcctaaaatgtaacggaggcgtacgtaaggtctgctcagaacggttggcaatcgttcgtagagtacaagagtataagcaggcttgactgcgagacctacaagtcgagcagagaggaaactcggttctagtgatccggcggctcagagtggaatggccgtcgctcaacggataaaaggtactccggggataacaggctgatcttgcccaagagtccacatcgacggcaaggtttggcacctcgatgtcggctcatcgcatcctggggctgaagttggtcccaagggtatggctgttcgccatttaaagcggtacgcgagctgggttcagaacgtcgtgagacagttcggtccctatcctccgtaggcgtaagagaattgagaagggctgcccctagtacgagaggaccggggtggacgaacctctggtgtagcagttgtcgaccaacggcatagctgcttagctacgttcggaacggataaccgctgaaagcatctaagtgggaagccggcttcaagatgagttctcttttcggtaaggcccctcgtagactacgaggttgataggccgcagctgcaagcgctgcgaggcgttcaggcgagcggtactaatcggccgagctctttatcttactaattttcatcgtcttcgcatcgtggggacggacgctatgcaaccttcagggtgcacgggcattgagaaccgaataggtctcatgctgaatatcctgcatgagcgcgaccatggaggcagggatcacccgatcccattccgaactcggcagttaagcctgccatcgccgaaagtactgcggtgtagtccgtgggaggataggacgtcgtgctcatgcaggatattttcgttaccggcgcctcgcggcgccggcgggcccgcgggagcgggcccttcccttgcgccgggcgggacgcgcccgggcgacgagcgacgggcgggcgtttatgctgcggagaatgggcgcgggagcgcgatttgctgtgacggtggcggggtttgcctgtctctacaccgtagctgtcgtattcttctattacgattggctgttcgatcttccattcgaagccagccctctgatatacggtctcgtgctcaacgcctccctgtgcgctgctgcgcttactttgttttcgcgtttcggacgccatgcttcgcctcgtctcgtgttcggcgtcggagccgttgcctatgcgtgcgcatgcgcgttgctgcttggggcagctcatggcggcaaccccctctttccatactgcgccggcgccctggccggcatcggggctggattgctcatgccgctgtggttcgagcggatgggcgttcttgcgaaaaaccgtttcgcgtacgtgcttggcataggatcgctcgcaagtgcgcttgcggcgcttgcgatagaaaagctgccccctatcggcgttgtctgtgcaagcgcggggcttcttgcttgctcgtttggcatgctcgcggcgcttggtgcgctgggcgacgagcggtattctggcaaagaagaacttggcggcgattcgatcggcgctttgacgggggagccttccgaaggcacctcgcccgatgacggggtttctccctggtcttgcttggccgctccgcttctgtacgtgtttctgctttcggtaatttacggggttctcgatgtggttgcgatggcttccccttcgttgaccatggctgattccggttcggcttcgcaaatcggcggcctggctatcgacgtggcctttcttatctacgttcggctcgacggcaagcgctatgcggttctcctcaacgcggctctcggcatcattgcgacgggcttggtgtttttgccgtttcttcccgatgcctacagtaccgttctggtcgcgctcacccatatgggttgggagatggccctgctcgcatcctacgcacttgcgatagagatgtttcgcggtagcaggaccaagctcgtggcggcagctgcggtcgtgttcgcattccctcggcctggcgttatggctggaagcgttgtcgcttcgctcatcgcagtcgacaatcaatacgctttcgctcagatggttatcgttgcattcgcgttgctgtacctcatcatgatgggcgtgtggctcctccgcacgcgggagaagcgtgctgcggagcgcgccattcggaaacgggacgagcttatcaagcgctatgcggaagcacgcgatgatctttacgcccttgcatgcgatgatctgtcggctgagtacgggctgaccgcacgcgaaacggaattgctcaagctgctggctcagggccgcgatgccgcatttgtcgagagcaggctctacctgtcgagaaacacggtgaagagctatacgaaatcggtgtatgcgaagctgggcgttcactcgaaacaggaacttatcgatcttgtcaaggcgagcctgccggtcgaatgacgcatggcttgacgttcttcggccggttgccgggatggagccgcgtcgcgccctttggcagtctgtcgttcatctgccggttgaaggtcggcgagcgcagcgacgggctgcggccttggcctgccggggtcgtaccggacggggattcaggaagaggctacttgatgattctgtggtcggaaagttttccgaaaaaacctcttgcctgatgggacaagcatatgtattatagttcagccgcgttcgtaagggcgcggaatgctgttcagggaatcccttggcatgaaggctttcaaggctgaatcggattgatatgcgagacggtcagaaaaaagttttcaaaactttaaaaaagttgttgacagcggggtaacggaacagtaatatatctccttgcgcgtttgcctccggcgaacacgcgggacggcccggaagggccgccgagaaccttgaaaaccggatactgtgatacgaataagctagtagaacctcgtcagatgcccgcccccagaaaagggctccgggcaccttgacaaaagaccaagattcattcttgattttcgaagacgcgccccttcggggacgctttttgaacggagagtttgatcctggctcaggatgaacgctggcggcgtgcttaacacatgcaagtcgaacgaataacccacctccgggtggttatagagtggcgaacgggtgagtaacacgtgaccaacctacctctcacttcgggataacccagagaaatctgtgctaataccgaatactccggaggccccgcatggggcctccgggaaagctccgacggtgggagatggggtcgcggcctattagatagttggtggggtaacggcctaccaagtcagcgataggtagccgggttgagagaccgatcggccacattgggactgagatacggcccagactcctacgggaggcagcagtggggaattttgcgcaatgggggaaaccctgacgcagcaacgccgcgtgcgggatgacggccttcgggttgtaaaccgctttcagcagggaagaaattgacggtacctgcagaagaagctccggctaactacgtgccagcagccgcggtaatacgtagggagcaagcgttatccggatttattgggcgtaaagcgcgcgtaggcggcctgttaagcggaatctctaatctgagggctcaacccccagccggattccgaactggcaggctcgagtttggtagaggaagatggaattcccagtgtagcggtgaaatgcgcagatattgggaagaacaccgatggcgaaggcagtcttctgggccaacactgacgctgaggtgcgaaagcgtggggagcaaacaggattagataccctggtagtccacgccgtaaacgatgggcactaggtgtggggaggagtacctttccgtgccgcagctaacgcattaagtgccccgcctggggagtacggccgcaaggctaaaactcaaaggaattgacgggggcccgcacaagcagcggagcatgtggcttaattcgaagcaacgcgaagaaccttaccagggcttgacattcaggtgaagccggggaaacccggtggccgaaaggagcctgaacaggtggtgcatggctgtcgtcagctcgtgtcgtgagatgttgggttaagtcccgcaacgagcgcaacccctgtcgtatgttgccagcattcagttggggactcatacgagactgccggcgtcaagccggaggaaggtggggacgacgtcaagtcatcatgccctttatgtcctgggctgcacacgtgctacaatggccggtacaacgggctgcgaacccgcgagggcgagcgaatcccttaaaaccggtcccagttcggattggaggctgcaattcgcctccatgaagtcggagttgctagtaatcgcggatcagcatgccgcggtgaatacgttcccgggccttgtacacaccgcccgtcacaccacccgagttgtctgcacccgaagtcgacggcctaacccgcaagggagggagtcgccgaaggtgtggggagtaaggggggtgaagtcgtaacaaggtagccgtaccggaaggtgcggctggatcacctcctttctagggagactaacattagtcaggctcaagtcgagacgactccttgagacctagagattcttatcacagatttgagataggcgctacggcttaggcgtccctcgcagtatccggtttcgaaggctctcggccttcggggagccccctcaggggcgcccgcgcaccttgaaagttgcatagcgtttagtgaatcatcgtcaattcttttttagatttgaagtgattcgcatcacgatcgcgaatgatatttgaaagacccaaatactttatttaagttttgagaagataaagatattaagggcacacggtggatgccttggcataagaagtcgatgaaggacgtgacaagctgcgataagctgcggtgaggtgcaaattacccttgacccgcagatttccgaatgggggaacccagccggggtaatgcccggttactctggcccgaacacatagggccagcagaggcaacccggggaactgaaacatctaagtacccggaggaagagaaatcaaccgagattgcgctagtagcggcgagcgaacgcgcaccagcccaaacccatgcatgtgtaagcttcagggcgttgctgcatgaggtgttgtggggccgtctattctttcaacctgtattgacagacgcagttacaaagcgtcgtggtagcggaacggcatggaaaggccggccagagcgggtaaaagccccgtacgcgaaaccacggcgcctgcgaagacggttcccgagtaatgccggacacgtgaaatccggcatgaatccggggggaccaccctccaaggctaaatactctcttatgaccgatagcgaaccagtaccgtgagggaaaggtgaaaagtaccccgagaggggagtgaaatagtacctgaaaccgtgtgcctacaagcagtcggagcagcgcttgcgctgtgacggcgtgccttttgtagaatgagccagcgagttgcggtgtgcggcgaggttaagttgtgaaacgagccgtagtgaaagcgagcctttaagatggcgcttagtcgtatgctgcagacgcgaagccgagtgagctatccatgggcaggctgaagcgggggtaagaccccgtggagggccgaacccacttcggttgaaaacggaggggatgacctgtggataggagtgaaaggctaatcaaactcggagatatctcgttctccccgaaatagctttagggctagcctcgatcgtttaataccggtggtagagcactggatcttctagggggcttcaccgcctaccgaaaagaaccaaactccgaatgccggtattccagagatcgggagtcagaatatgtgggctaagctgtgtattcgaaagggaaacagcccagaccgcctgctaaggtccctaaatccatgctaagtggcaaaggatgtgcgtttgcctagacaaccaggatgttggcttagaagcagccatgcatttaaagagtgcgtaatagctcactggtcaagtggacatgcgccgacaattcacggggctaagcatggtaccgaagcagcggactgaattatttcagtggtaggggagctttccataccgggtcgaagccggagggtaaccgacggtggactgtatggaagtgagaatgctggcatgagtaacgagagaagtgcgagaaacacttccgccgtaagcctaagggttcctgggcaaggctaatcctcccagggtcagtcgggagctaaggcgaggccgcgaggcgtagccgatgcacaacaggttgatattcctgtaccaccaacgagcgttaccaccgatggggtgacggagaagggtagctgggcggggttctggacgtccccgtgaaagcgcgtagggcgatgcgtaggaaaatccgcgcgtcatgtgcctgagacgttagacgaagcaattgagtgaagtcagtgagcccatgcttccaagaaaaacctctagggagctacgttggtgcccgtaccaaaaccgacacaggtaggcgggtagaacataccaaggcgatcgggagaactatggttaaggaactcggcatattgactccgtaacttcgggagaaggagtgcccctgacggtgaaggaccccgcgtccggagctatcgggggtcgcagtgaaacggcccaagcgactgtttatcaaaaacacaggactctgctaagtcgtaagacgacgtatagggtctgacgcctgcccggtgttggaaggttacgtggatgggttagcgcaagcgaagctctgaaactaagccccagtaaacggcggccgtaactataacggtcctaaggtagcgaaattccttgtcgggtaagttccgacctgcacgaatggcgtaacgatttgggcgctgtctcaaccatagacccggtgaaattgtattattcgtgaagatgcgaattacctgcggaaggacggaaagaccccgtgaacctttactgcagcttgacattggttgttggttcggtgtgtagaggataggtgggagacttcgaagcagggacgccagttcctgtggagtcgcccttggaataccaccctcatcgtatcggcaacctaacgtgcgaccgtgatccggcgtgcggaccgtgtcaggtgggtagtttgactggggcggtcgcctcctaaaatgtaacggaggcgtacgtaaggtctgctcagaacggttggcaatcgttcgtagagtacaagagtataagcaggcttgactgcgagacctacaagtcgagcagagaggaaactcggttctagtgatccggcggctcagagtggaatggccgtcgctcaacggataaaaggtactccggggataacaggctgatcttgcccaagagtccacatcgacggcaaggtttggcacctcgatgtcggctcatcgcatcctggggctgaagttggtcccaagggtatggctgttcgccatttaaagcggtacgcgagctgggttcagaacgtcgtgagacagttcggtccctatcctccgtaggcgtaagagaattgagaagggctgcccctagtacgagaggaccggggtggacgaacctctggtgtagcagttgtcgaccaacggcatagctgcttagctacgttcggaacggataaccgctgaaagcatctaagtgggaagccggcttcaagatgagttctcttttcggtaaggcccctcgtagactacgaggttgataggccgcagctgcaagcgctgcgaggcgttcaggcgagcggtactaatcggccgagctctttatcttactaattttcatcgtcttcgcatcgtggggacggacgctatgcaaccttcagggtgcacgggcattgagaaccgaataggtctcatgctgaatatcctgcatgagcgcgaccatggaggcagggatcacccgatcccattccgaactcggcagttaagcctgccatcgccgaaagtactgcggtgtagtccgtgggaggataggacgtcgtgctcatgcaggatattttcgttaccggcgcctcgcggcgccggcgggcccgcgggagcgggcccttcccttgcgccgggcgggacgcgcccgggcgacgagcgacgggcgggcccgatcgggtgtacaccgcttttcaatggatttctcccgtgcattgccgcccgtccaggcgcatctcgacgaccgtttgcccgcgagctctcggtcgtgaagtggagattgccgtcggagaagcttcgatgcgatataatggaattgaattattctggcacaaagcatcgatttatcccgcgtgcaaacagggttctgctatatgtgcccaggccgacaagcggcagatggagacacgaattgagcgaaaaatcacaagacacgaaagatctggcggctcgggcgatcgagagcgatgctgtcttggccgagcttgttgaaaacctctcgggagcatcgaggaggattcgccagatatcggctgcggttctcgcccaggttgccaaggaatctcccgatcggctgatcgactacgcaggagccgtcgtcgacgcgctcaaccgacccgaagcccagacgcgctgggagtgcctcgatgtgctcacggccttggtcgatcgcgattcgcgcgtgtgcgacagagcggtatcaggggctgaaacggcgttgttcgacgaggagagcggcccggtgcggcttgcggccatgcgtttcctctgcgcgctcggcgcaacgaccgaaaaccgatccgaaaaagtctggccgcttgtggatgaggccatccaatgctaccatggcgaccttgagtttcaggacatgctcgttgcggttgtcgatttttctgcgggcaagctcagcccaacggtgaaaagcgaacttgccgagcgtatgaagttcgacgccgaaaacagtcgcggcgctttgaagcgcagggcagcccagatcatcgaaaacgtttcgtaaccttcgggcgaagatgcggcgcgctgatcgcggcgttttcgcgaggagcgtacatccgaggaggaacgcagcaatggcaaagcatacggtcacgctcatcccgggcgatggcatcggcattgaaacctctgccgccatgcaacgcgtcgtagaggcgagcggcgccgaaatcgagtgggagatcgccgaggcgggtgcctctatggtggaggcctgcggcaccccgcttcccgattcgacgattgaggcggtgcggcgaaacggggtggcgatcaaaggacccgttaccacgccggtcggcgagggattcaggagcgtcaacgttgcgcttcgccaagcactcgacctgtacgtctgcttgcgtccggtcctgtcgattccgggggcgggcggtcgttacgacgatgtcgatctggttatcgtgcgggagaactccgaggatctgtacgccgggatcgaattcgaggaaggcgccgacgaaacgcgcgagctgatcgaattctgccgcagtgcgcaggcgggtgcgatccgccccgattcgggcatatccatcaagccggtatccgttaccgcaacgcgcaacatcgtgcgctatgcgttcgaatacgcgcttgagcacgggcgttccaaggtgacggccgtccacaaggcgaacatcatgaaacataccgacggcctgttccttcgggtcgcccgcgaggttgcgaagcgctacgagggtcgcatcgaattcgacgatcggatcatcgatgcgttctgcatgaacatggtcatcgatccgacgcagttcgatgtgatcgtgtttccgaacctctacggcgatatagcgagcgatttgggggcgggtctggtcggcggattgggaatcgcgcccggtgcgaacatcggggatgggtgtgcggtgttcgaggccgttcacggctcggcgcccgatattgcgggcaaaaaccttgccaacccgactgccgaaatcctttctgcggcgatgatgctcgatcatctcggcgaaacggcatgcgcttcgcgcattcgcaaggctgtctgccaggtgtatgccgagggcgccgtgctcacggccgacatccgcaaggcgactggatcgacgcatgcggccgcaagctgcaccgagttcaccgatgccctcgttgcggcgttgacttcatagtgcctgcgggggccgaaagggcgctcgctgccggataagatgcatgaatgaaaagacgagaggggttttgaacctatgacgcaaaagcaatccatccgaagcgatcggcttgttgtcggtggcgaaacgtatacgtattttcccgtttcttcggtcgaaggatccgagaagctgccgttttccctaacggtgctgcttgagaacgcgcttcgatgctccgcgaccgatgaggaagcgcgcgaagccgctgcgaggatcatcgaagcgggtcttgcgggcgaggttggagaggagctgtcgtacagtccggcgcgcgtgctcctgcaggacttcaccggcgtgccggtattcgtcgattttgccgtgatgcgcgaggccatggcgtcgcttgggggggatccggcaaaggttaacccccagattccctgcgatctggttatcgatcattcggtgatcgccgacgaggcgggatgcgcaggcgcgctgcagaagaacatggagctcgaattcgagcgcaacaacgaacgttacacgtttctcaaatgggcgcagagctcgttcgagaacgtgcgcatcgtgcctcccggaggcggaatatgccatcagatcaacgttgaggaattctcgcaggttgcgatggttcgcgaggctgaaggcgagaagaccgtttacttcgatacggttgtgggaaccgatagccatacgacgacggcgaacggcatcggcgttttgagttggggcgtaggcggcatcgaggccgaggccgctgcgcttggccagccgatcacgacgctcgttccccgagtcgtgggcatcaaactgacgggcgcgctttcggaaggcgtgtcggcgatggatcttgcgctcgtgtttgcgaacatgctgcgcgcacgcggggtggtagggtcgttcgtcgaatgcttcggtcccgggctcgaaagcctgagcgccacccagcgcgcttgcgttgcgaacatgactcccgaatacggatgcacgtgcacgctgttccccgtcgatcggcagacgctcgactacctgcgtgtgacgggacgcagcgacgaacagatcgcgctgatcgaagcctatgcgaaggcgcagggcttctggaacgatccgtcggccgaaccccgtgcgtatgcggaggttatcgaactcgacctttcctccgtcaagcgcaatctcgccggtccttcgcgtccgcacgacctcatcgccgccgccgatgcgcaagaggcgttttattcggtctgcgccgacagggggttgtcgctcgacaagcgggtcgaggtcgaagtgctcggcgagcgcttcgggctttcgcacggcgctctcgccatcgcggcggttacgagctgcacgaccgcaaccgatccagccatgatgatcgcttcggggctgattgcgaagcgtgccgccgaagcggggcttgcggccaagccgtgggtcaaatgcgtgctcgcgcccggaagcaaggcgactgagcttctgctcgagcgtgcgggccttatcgatgggctgcagaagctcggcttctacaactgcgggttcgggtgcatgagctgcatcggcaattcgggtcccatcctttcttcgatgcacgacgtggcgggcgagatcgagcttgcgagcgtgctttccgggaacaggaacttcgagggccgtatctcgcccgacgtgtcccagaactaccttgcggcgcctgcgatggtgatcgcttatgcgctcgtcggcacgatcgacttcgatttcgaaaacgatccgctgggcacggacggcaacggcgataaggtgtttctcgccgacatctggccaagcgatgccgagatcgcgcgcgaactcgaagcctgcgtgacacgcgacctctacgacgagggccgcgagggtctcatggacggcgacgcgcgctggcaggcgctctcggtcgatccgagtgcgacgttttcatgggacgacgcttcgacttacgttcgccgcgccccgtacttcgacggcatgggcgtcgaacctgcggcggtggagcccatcgtgggcgcccgggtgctcgagagcctcggcgatttcatcaccaccgaccacatcagccctgcgggctccatcgcatccgattcgccggcggcagcctatctgcgcgagcgcggcgtgcccgaagagctgttcaacacctacggctcgcggcgcggcaaccacgaagtcatgatgcgcggcacgttcgccaatgtgaagctccagaacaagcttgccgagggcaggcgcgggcattggacgcgcgatcaactgacgggcgagcttgcaagcgtattcgacgccgccatggactacgaggccaacgaggttccgctcgtggtgcttgccggcaagatgtacggaagcggttcgtcgcgcgactgggcggcgaagggtccgatgctgctcggcgttcgcgcggcgttcgccgaaagcttcgagcgcatccaccggtcgaacctgatcggcatgggcatccttcccctgcaattcatggaaggcgaaaacgccgaaacgctcggtcttgacggcagcgaggcgataagcatcgagccggttgatttttcgggcggccttccgaagcctgcgaccgttaccgtgacggctgtgaagcccgatggcaccgaaaccgcgtttcaggcgatcgtgcgcgtggatacgccgacggagggccgctatttcgagcagggcggaatccttccgtacgtgcttcgcacgctggtctagccgtcggatccccctggtgaagataacgccgcatgcggcagaaccgcatgcgggcggatcttctgctgggcggaatcgatggacaagcttcttcatcaccgttcggtaaacttctcgggccgtgcgcgtgcgcgcggccctttacggtacaatactgagaacgtgtaatctatttgcattgcattgtgcactgagaagggatgtttattcgtgaaacagacatcaggtatagatgccttgttggaagccctgcgtcagtcgggcgtcgatgtgggaagcgggggaaatccttttaccgggaaaggccccgacgacggttctgacgggggagcgtcgggcggaggcgatcggccgccgcgcgtcgaggtttcgttcggcgataaattcgccgcatgggggaagaaggcgatcgtcatcgcgatcatcgccatcctcatcgtggcagcggttgcgtattggtggttccatccgcctatcaacatccactccaccgatacgtggatgttcattgcgattttcattctgctgcccctgttcttgttcttctcggcgcgctcctacgcctacaagaagggcaccgggcgctacgagtacaacgagaagaaggcgaagacgttcaagatcgcttcgtatctgcccgtgatcgtcgtgctcgtcggtatcgtgggagcggtggcctccctttcgttcttcccgggtaacgccgagaagtacgcgagcatcctccagaccactgacgacgagttcgcccaggatatcaaggaggtcgactacacccagatacccgtcatcgaccgtgattcggcggtgcttttgggtaaccgcaccatgggttcgattcccgagtacgtaagccagttcgaaatttcgccgctctacagtcagatcaactaccagggcaatcccgtgcgtgtgagccccctgggctacgccgacctgttcaaatggctcgcaaaccgcgagcagggcatccctgcctacgcgctcgtcaacatgacgacgcaggatgccgagatcgtgcgcttgggcgacaacccgatccgctactcgcaatcggagccgctcgcgcgcaacatcgatcgccatgtgcagctcaagtacccgttctacatgttcgaccagttcgctttcgagatcgacgacgacggcaagccgtggtggatctgcccggttcaggatcgtaccatcggcctgttcggcggcaagaccatccagcgcgttgtcatgtgcgacgcgacgacgggcgaatgcaccgatcttgcggtggaagaggtgccgcagtgggtcgaccgcgtgtatcccgccgacctgcttgtggagcagtacaactggtacggtgcctacaaggacggttggatcaactcgtggcttggccagcagggcgtcgtgcaaaccacgccgggcaccaacggtcagcttgggtacaactacatcgccaaagacgatgacgtatgggtgtactccggcgtgacttcggccacggccgacaactccatcgtcggtttcgtgctggtgaaccaacgcaccgccgagtcgcacttctacgaagtggccggagcgacggaggattcggccatgcgctcggccgagggccaggtgcagcacctcggctataacgcgacgttcccgctgctcatcaacatcagtggccagccgacgtacttcatggccctgaaggacaacgcggggctcgtgaagatgttcgcaatgctcgacatccaacgctaccagaacgtggcggtgggcaataccgtcgaagagacgcagcaggcgtacaagacgcttctggccaccaacggcgttgagcttgccgacgagggcgacgagagcatcgtgacgaaaacgagcggcacgatcgagcggatcgtaacggcggtcgtcgatggaaactcgcatttctacgtgaagctcgtcgacgatacgaacctctacgacttcgcgctgccgcgcctcatgggaatcgtggcatacgcggaaggcgatgagatcacgttcaactacctcgattccgatggcgtatgcgttgccgaagagatcatcggggagcgggtgtcgtcggaggctgcagccgcagccgccaaagcggcgaacccctcctcggccgacgagggggcgcagggggcagccggggcgaccggcggcgatgcggccgccgctgccggcgccgatgccgcgggttccgaggcggcggcgtaaggccgaagcgaggcttattcgtgaaaccgcttgacatcgcctgagaagcgattagtatgtaacggtgcgtttttacgcatggaatgaaagattgttccgctgcccaagacagctggtaccgagaggtttaatcgcgcgagcggcccgccgaggtggtctgtaaattgagttttgcgacccctgctgtcattgtgcaccaggggtcgtttcttttgcatgaagctcaagattcacccacgatgagggacggaacgcgagttttatggaaaaggaggtgtactacatgcccaatgcacataacgttgaaacgcttgctaagatcaaggacgagcttcaggagatcaacgccatgtgggtcgtcgattatcgcggcctgacggtgaagcagatccaggagctgcgcaacagcatccgcgaggcgggcgcgagcatgaaagtgtacaagaacacgctcatgcatcttgcgctcgatgagctcgagcttcccaacttggatgcggttctcgagggtccgtcggctttcgtgttcgcaggcgaagatcccgttgcatccgcaaaggccctgaaggattttgcgaaagccaacaaggtcctcgagatcaagggcggcatgatggacggcaagttcgtcgatgctgcgcaggtggaagccatcgcttcgctgccttcccgcgaaggcctcatcgcaatgctgctcggcacgatcagcaacccgctcgtgcagacggttcgcgtgctcaacgctcccatggaggcgttcgctcgttgcgtcaaccaaattgcagagcaaaaacccgcagcgtaagcgctgcatgaagccggctgcgtaatgcgatgccggcgtttgaaaacgtaatgtacatccgcttatgctgtggatgaaagaaaaaaggagaactatcatggctgtgacccgtgaagagatcgtcgaggcattgaaagaaatgcccgccctggaactgtccgaactcgttaaggaactcgaagaggtcttcggcgtttccgctgccgccccggttgccgtggctgctgctcctgctgctggcgacggtgccggcgctgctgaggaaaagaccgacttcgatgtcgtcctcgagggctttggcgacaacaagatcgccgtcatcaaggtcgtccgcgagatcaccggtctcggcctcaaggaagccaaggagctcgtcgagagcgctccgaaggctgtccaggagggcgttgccaaggataaggccgaagagctcaagaagcagctcgaggatgccggcgctgctgttaccctcaagtaacagtctccggttcgacgcagcgtttcagctgcgccgccgcctcggtgtaaccggttcttcatgaacctaacaccttggaaacgaaacgcgggagggaagcgagagcttccctcctttgtgtatagtgggggcaatttcaaggtagaaaggaatctcatgcaagttggttattttaaaaccgcatggagcgatgtcaaaaattccaaggggtggttcgggaagatcctgctgctttcccttgttgcgctgattcccgtgttcggggccattgcggttgccggatatctgtacgggtgggcacgcgatatcgcctggggcattcatgggccgatgccgaaacgcctgttcggcaacgaggacggcaagctgtacagccgaggcttcttcgttttggtaataggcttcgtctttgcattgcttccgtgggccattgaattggtctggggcctcgtcatgggcttcagctcgttgacgttcggccatgggtacagctacggctaccttaatggcggtacgttcgttttcggcgggttcatgacccttatcttcacggctctgaccatagcggcaacattcgtcgccctgctgttccagtgggtcggctcgatgcgcatgagcatttacggaaggctttcggcgggctttcagttcaacaagatgtgggcgatgatccggcatgacttcggcgggctgatgcgcatcttcggcatgtgcattcttctttcagccatcatctcggtcattatctcgatcgtgttcttcttcgtcgtagccatcaccgtattcatcggaatcgccgcgacgggcgggaatatgagagcggatcatctggacggtactgttatcgggtggatcatcgctttcggcggaatcgccatcgtcggcatgctccttgcgagttacgtatccgttgtcgcgtgcctgttcgtggggacgctcgttacgcgctccctcggctactggacgcgccagttcgatgttcccgcctggcgcggacaagacgatccgatgccgttcgagcttcaagcggcggcagcccgacaggcgcagcagccttaccaggctgcaggttcgcagggatatgggggtccgcagcccggcagccagtacggccagccgatctatcagcaaacgccaccgcaatccgcaccgccgcaggcgagccatgttcatgcgggcgcatacccgcatggcgcgaatccgtcggcaaacgaaaccgccgctccctcggagccgacgggcggcatgtccgatacgggcggcgaatcgggcattccgcgatagggtatccgatcgcataatcctctgtgcaatgagaagcggctccgaatttcggagccgcttttttccgttcgcggatgattatttgccagtcgtggacaaaaaaccgccgtgttcgttgaccttgtaatcgttgcaacccccatgattgcctcacaccttatccgctgcaacccttctgatcacgcaaaggaaaaccggatgtaagaaagcaaaggaggcatgtcatgaaagcgacgaagcaagagatggaactgcggaaaccccagaactcaccagagaagctcgatgtagccgccctcaacgccaaccgcgcaatggcgacggctcccatcagcgatctccacggcgagatgctctgggcggttgtgaaaaagctccgcgaacccgaaatgattgccttcattgcagatcccgaagtccgccgcgcggcgaagatttcgaccattgcgaaactcaacgacaccgatcttctcatcgccatcgccgcagccgatgttccggtgttcgctcgacgcgatgcccttctgcgcatcgacgagctgtgcgacggagagcccctttcggggcgcgacatcgaccgtctcattccctgtctctacgtcaaagatttgatcgcctacacggtcgtcctcatggatatggccgactacgactggtgctcgcgctgcgacgagcgcgttgtgaacgcgctttgcgccgcaatgtacgggtgccagagcatgcacgaatcggtgcttctcgaagacgcgttcgcccacctgagccacatgcgctcggatttgaacaagagcctgcgcgcgtgcagtcctgaaaaattcctcaccggagacacgtacgctccgcttgccccgaccgtgatgtatctcgaccgttatcccgtagacaacgttgcatagccgatctccaagacgaagagtagaagggaacccctcatgaagaagaacacgcgtaccgcctttatcagacatatgctcgaaaacgagcgatccatcgagccttctccggaattcagctacaaagcgctgatcaagagtcgccaggattacgacggcatgtaccagcgatccatcgacgaccccgagacgttttgggctcagatggccgaggagcatatcgactggttcaagccctgggatgccgtcgaggaatacgatttcgaatcggaaaacccctacgtccgctatttccggggagcggagctcaacgtgtcgtacaactgtctggaccgacatctggacggacctcgccgcaacaaggcggcgctcatctggcaaggcgagccgaatgaggaagtggacgtctacacctatcagcggcttcatcgcgaggtgtgcaaagccgccaacatgctgaagcgcttgggcgtgaagaagggcgatcgcgtggtgctgtacctccccatggttccccagctggccatcagcatgcttgcctgcgcgcgcatcggcgccattcactgcgtggtgttcagcggcctttccgccgaagccttgaaggaccgcatcgaggattcgggcgcgaaagtcgtcattacgtcgaattacggataccgctccggaaagatcctgcacctcaaagacatctgcgacaaagcgctcgacatgtgcccgcaggtcaaggcatgcatcgttgttcggcgcatcgagaagcggaccgacatgaaagtggaccgcgatgtgtggtgggatgaccagatggccgcggagtctccgcactgcgatcccgagaacgtcgaggcgaacgaaccgctgttcatcctctatacgagcggcagcacggcgaagcccaagggaatcctccatggtacaggcggatatcttctgtacgcgacgctgacgatgaagtacgtgttcgatctcaaggaaaccgacatctattggtgcacggccgatgcgggatggattacgggccattcgtacttggtatacgggccgctttccaacggcgcgacatcgctcatgttcgaaggcgttccgaactatccgaagcccgatcgctattgggatgttgttgagaagttcggcgtgaacatcctgtatacggcgccgaccgctgttcgctcgatgatgaaagacggagagcagtggatcaacgaccatgatatcagcacgctgcgcttgctcggatcggtgggcgagcccatcacctcgaaagcgtggctgtggtactactcggcgatcggccagggccgatgccctatcgccgacacgtggtggcagaccgagaccggcggtgtcatgatcacgacgattcccggcgcggtcgatatgaagcccggctcggcggcgctgccgtttttcggaatatccccgagggtcatcggctcggacggcaacgatacgaagcccaacgagggcggaagcctggttatctcaagaccgtggcccggcatgatgctcggcgtgtacaacaatcccgaggcgttcaagaacgtgtacttcccgatgcccggtttctacctgaccggtgacggcgccttccgcgatgaggacgggtacttctggattacgggtcgcatcgacgacgtcatgaacgtttcgggccaccgcatcggcacggccgaagtggagagcgctcttgtgtcggtgctccaggttgccgaggcggcggttgtcgggtatccgcacccggtcaagggcgaaggcatctacgcctacgtcacggtgaaggagggaacggttatcaacgacgatctgcgagcggagctctgcaaccacgtccgttcgaatatcggcccgatcgcaacgcccgatgtaattcatttcgcaagcgcccttcccaagacccgaagcgggaagatcatgcgccgtatcctgcgcaagatcgccgcgcaggataccgaaaacctgtgcgacatctcgactttgtccgaaccttccgtcgtcaacgacctcattcaggaaaccaagcgcatgagcgcttaaccgccagacggcatcgggcttcggcccggtgcctcgcggccgcttggcgcagcgaaaagcgcaaatctgccgataccgcccgtggcatgcgaaacgctgtcacgggcggtagccgtttgcgctggaaacgcggacggtgcccgacgctatgcgtttacgagtaccgagatatggatgaggtagtcttccgagttttccgacatgagataggagttcatgtcgagttcgtaaatagggccgagcatttcgaagccctccttctttatatagcgaaagagcttctcgtacgatcgggcgacggtgctcgtgcctccctgatgcagaacgacggcgtagtttccgcgcggcttgcgttcgattcggttgccgaggttgattttgttctcggggggagaaacccaggtgaccagcttggtgtagtagtactcttcgggtttgctctggtcggggatgtcgatgatgcggccgagggggaacttggatacgcccgccgcagtgcggcagaaatcggaatggtcgctcatggcctgcgcgaagctcttctgcgtgcgctcgcgctcgacttcggtggtgatgaaccagatctcgtcccaataggacagacgcggcttgtctttggggaagagaagcgcccgctgggtgatgtagcgcatcttctccatcatgccgatgcgcgcatcgatgatatcgcgctgtcgcatcatcttttcgatgctgtcctgcgcattatcgaggaacagctcggtcgatcggttgtcgaggtactccttgatttccttcatggacatgcctgtgtcgaggaagaagcggatgacatcgaacatgtagagctgcttgagcgagtagtatcgatagccgttatccctgacttccttcggcttgagcaagccgattttgtcgtaatggatgagcagctctctgctgacattgcacatctgggcaaactctcctgacgagagcagcagcgaatcctgcattcagaccccctttcgcagccgagcgctcgatcgtcgagctgccgcgggagccgtcggtttcgctgcggttgaagcgatatcggcggaacgaaacgagctcgtgcgggcagatgcgcttggcagtggcaccatccatcgatattactccaatattgcaatgtcttacctgataaaacgggaagcgatgcaaaacagcctgccagcgacacttggaagcggaacgatacgtcgcatttgcgctccgagctgctggattgttgcgctatcatgtaagcggcgtttccgggaatgcagactgatctgcgggcttcggggcgcaatgcacgttctcgaactttcggaggcctcgtttacatggcggttgatacggcggatacgcaagacggtttcgcagacggtggccagggcgccttctctttcggatcgcttggacggcttgcgcctggttggtgggagcctgcggacggcgcagagccggatccttggctttcttcggaagaggcgctcgatcgctttctcgactggacggcttcgcgtggcatagagctgtggccccatcaggaagaggcgctcatggggcttatgatgggcgaccatgtgatcctcggcacgccgacgggttcgggaaagtcgcttgtagcgctcggcatgcacttcatggcgttggcgacaggtcgccgcgcttattatacggctcccataaaggcgctcgtcagcgagaagttcttcgacctggtcgatatcctcggtcgggaaaacgtgggcatgatcacgggagatgcgcatatcaacaccgacgctcccgtcatctgctgcacagccgagatcctcgccaaccaggcgttgcgagaaggggagagcgccgatgtgggttgcgtggcgatggatgaattccactattacggagattacgaccgtgggtgggcgtggcaagtgccgctgctcatgctcccgaaggcgcagttcctgctcatgagcgcaacgctcggggatgtgaccgagatcgccgcatccctcgaagcccgaacgggtaccgatgtcgatgttgtggccgacgcggcgcgccccgttccgcttgcctacgagtattcggagatgctgcttgagggaacggtcgagcttgcgttgcgcaacggcgaggcgcctttgtaccttgttcacttctcccaggatgcggcgctctccaccgcccaagcgctttcgagcttcggtgcggccaccaaggagcagcgcgagctcatcaaagatgcagtctcgggtacgcgcttttccaccgcgttcggcaaaacgctcaagcggttgctggcgagcggtgtgggcgtgcatcacgcgggcatgctcccgcgctatcgcttgctggtggaaaagctcgcccagcaggggctgcttcccgttatctgcggaaccgacacgctcggtgtgggcatcaacgtgcccatccataccgttgtgctgacggcgctaaccaagttcgacggccataaaatgcgacggctgcgcgcccgtgagttccatcagatagtgggtcgggccggacgctcgggtttcgataccgaggggcttgtggtggccgaagcgcccgagcacgatatcgaaaacgcccgtgcggtcacgaaagccgggggagacccgaagaagcttcggaaaatcaaacgcaagaagccgcccgagggattcgtgtcgtggaacaagcagacgttcgagcgcctcatcgaatcggtgcccgagacgcttaagccgcgtatgcggataacccattcgatggttctttccctcgttgcgcaaggaggcgatgcatggagccgcgtccatcgcctcatcggggattcggctcaaaccgacgaggagaaggcggcgctctcggcgcgtgccgacgagatattcgatacgctgatctcggccgacgttgtggtgcgcgaagagggggaagacgggagcgtcgagtatttcaccacggttgatcttcctgaggattttgcgctcgaccagcccctttcgccgtttttgcttgcggctttggagctgctcgatcctgagagcgacacctatgcattcgatgtcatatccatggcggaggcgacgctcgaggacccgcgacaggtgctgcgcgcccaggagcggcaggcgagagacaaggccatggcggagatgaaggccgacggcgtcgagtacgaagagaggttggagaagctcgccgacatcacgtatcccaagccgcttgaagacatgcttgcggctgcgttcgatcggtactgcaccgatgtgccgtgggcgcgcgatttcgagctggcaccgaaatcggtgctgcgcgacatgctggagaccgcatccgatttcaagggctacgttggccgctacaacatcgcccgctccgaaggcacgcttctgcgctatctatccgatgcttatcgcgtgctcgaccggacggttcccgccgacaagcgcgacgagcaactgcaagatgccatcgcatggctcgctttcgtcgttcgctcggttgattcgagcctggttgacgaatgggagagcgcaggcacggcgctcgatgccgctccgcccgtgccgaccgatcaggtggtgcaggatcgcaggggcctcaccgtgctggtacgcaacgcgttgtttctgcgcgtgcgccttgccgcgcagggccgtgcgggagagctcggaaggctcgatcagctttgggggtgcggcgagccgcgttggcaaagcgcgctcgatgcatttcacgaggcgcatgaagagatcttgctcgacgccgacgcgcgttcttcggtatatctcgtcatcgacgagtcggacgagaagagcgagcatgtatggcatgtgcgccagatattcagcgattcggatggcgatcgcgatttcgcgatcgcagccgatgtcgacctggacgccacgcaggaggagagcgaagcggtgttcaagaactaccgcgtggggttcgccgaggaactgtgaggagattggccttgatctgcattttcataccggctcccgcaaagcatttgcgatgtcactcccgattcgtctgcagcagcggcgtgagctttccgtttgaaaggatggtaagcttgctcgttgcgcgcgagatggcggtgtataaacgccgccgcgaaagcgcatcgtcgggaaatatcctggctgttgcgttcggtatgatgacctggtcgaactcgaggccttttgcgagttcgagggtgatgagcgtcacgccgcttgccggtagcgtcgcgtcgcggctgacaagcgggggagcttcggtgccgagcatggcctgaattcgcttcgcctcgtttctccagggcacgatcacggctgtcaggccaccagtctgctgcgcttcttcgatgacgcggcgcagctcggtttcgtagctcccctcatcaaaacattcaatgatcacgggtttctcgtctgtccgttgaaccgatgagatgcgcaggcgctccttgtcggaaagcaggcttgcgaacagctcggtgatttcgggcgttgaacggtagcttgtgagcagctgacattcgcttaccgctttgccggctgcggcgaagaccgagcggacttcgccaaacgacgcggtgcccgcttcgatggcttggttcgggtcgccgagaagaaggaaattagccctcctgaaatagcgggcgagcacggcgagctgcgcggcggtgtaatcctgaacttcatcgatcatcacgtatttcgcttgcgggttgccgagaccggtaagcgccatcttgagataaagccattcgaccgacgaaaggccctgcgagccgagaatcctcgcgccgatgcggtcgatgtcgagccatgcatcgcgttcgacggactcgaatgccgatgcatggcgatcgttcaggtagcgaagggccaactcgcgagcctcctgatcatcctggggatcgatcgtctcatggaatacgcgcagctgctcttcggttgagaggatcgacatttcgtcttggacggcttcggttccggccatctgcgcaaggcgacttcgcaaccgttcgtcgaggtcttcccgtatgagtgcaacaaggtgcggacccgcgggtatatgccgatatttcgctgcgatcttgcgaatttggtcggctgagacaagacgggttcccgcgcattggacgtctcggaaatcggcgtggtcgaattcgaatgagccgatggcatcatcgatgcgcttcaatgcgtcgagcgggacgtctccgctgccgcttccccgatcgcccggcagcaaggtgcaggcgaattcctcccaggtgagagtttcggggttgctctcgccgaggtcgggcaggacgttgtcgatgtagtgacggaagacgggattcggcgtgatgagaaacacctcgcttggatcgaggctgccgcgctgtcggtagaacaggtaggcgatgcgctgcagaaggaccgaggttttcccgcttccggcgattccgcttaccaaaagggccggtacgtcgtcgtgtcggatgacgaggttctgctccttctgtatcgtcgcggttatcgcctgcatctgggaggttcgctgtttcgagagggaggcgagcagaagcgaatcctggatggctacggttgtgtcgaagtaggcgttgagcacgcttttgtcgatgtcgaattggcggcgcagcttgagatcggtttcgatcgtgcgtccgtcggcgcgatacgaggtgcgcccgttgtcttggttgtagtagacctctgccacgggcgaacgccaatcgacgatgaggcgacgatacgattcgtccgatatgcccgcgttgccgatgtagagctctttgggctcttcatcgggcttgaattgcagaaccactttcgcgaagtacggctgcctcagcaaaagccgaatcttggcgagcttttccgcgtcggcatcctgagccaggttgtagctgtcgatcacacggttcatcgcagcgaagtccgcataggtttccatcgcgtcggcgtaggttgcgaagttcggcgagagctcttcggacatggagcttttggctgaagctgcctcctcgtcggtctttttcatttgcgaaaccagatgaccgcacatggcttcgagtgttgcatatgtttcggtgaggcgctgttgttcctgctcgaatacagggtctgtgcttttgttgtcagaatcggggtgcacgaattctcctatgcgtatgctttgcgtttggctgaaaaagtatggtgtgcattgtacaggattagcgttcgcaaaggctttctgtagctgttttgtggcggagatttcgaatcaaggacgcagtccggcgggtttttggcggcagaggctcgttggctttggattttggcgcaaaagaaaaatcgaaaaatcgcgaaccatgcgccgggcggatgctactaaggtatgtacgtggcggattgcgaagcgatgtcgaagatggtgaacgtgagcgaaatcgatacagaggaagatcggatgcgggcggctcttgcgcgcgtttcacgtggtgacgagacggcacttgaagagctgtatcgagcctatgcccccgctgtgtttgcgttctcgctttctcgcgcgccgaatcgggagattgcggaagaggttgccgccgatgcgtggcttggctgttggcgttcggctcggtcgtttcgcggagacagcagggtcctcacctggcttctcggcatcgcgaagcgtcaggtttacgtgcatacgcgtcgcaagcgcttggtcgaggttccgcttgacgattcggtttgcgagattcccggcgacgaggaagacgccctcgaccgcattgcgggcgagacgagcgtggcggaaatgcttgccgccctcgatgctttgccggcagagctctccgaaacggcgcggcttgcctggctgcatgagcttccctattcggaaatcgccgcggtgaccgaagtgccgacgggtacggtgaaatcgcgcatatcccgtgcgcgccgtttactgaaagagatccttggaggtggccatgaaaaaagacgatgacgaaaggcgtttcccgttgattccggatgccggtttcggcgaggctcggttgggcgcgggcgagaccgggccgtcggtgggtgaattttcttctgaccgatcatcgttgcgcgcggcgctcttgcagcaggaaatcgagtgcgcatccggtctgcctgccttctcaagcgttgcggcccgcatcgacgcgcagccctctgcgctgaacgcgccgcgttggcccgccggcaaaagcctgcgaatcgcaggctctctcgccgtatcccagctcggggttattccgcgcgttgttatcccctcggccgtcgccgtggcctgcgtcgccgtctggcttgcctgcttcgcgcctcttttgccggatgccgtagatccgtcatggctgttttccgcgctgctgttgttcggggttgcgataaccgtgacgcttgccctctccgccgatcgggccgatgtccttttgctggctacgccgttggggccgcaagccgttatgctcgcccgcttggcagccgtgcttttcgtcgatgccgttgcgggaatcgcggcgtcggcggcgtttgcgttctggggggcgtctgtcgatttcgggggcgtcgtcgtgtcgtggcttgcacccctcgccgccgttgcgggcatcgcttcgttcgttactgtgtggacgggagcttcttgggccggggcgatcgtggctgcggctcttgttccggcgtttgcgccggttgcccacggcgccgacgcggctggtgtcgtggctctgatcggctccatgcaaggagcgcttggccccggaggcatcgctgcgatcggcgtggccgttcttgccgcggtcgtctgttcggctcggcgggcgcagctcgctcgattgcagctttcgtgaaccgatcgttgagagcgcgctactaaccgcagagaagatcggaattggttttgatatttcaggaggatggtatggactcgattgccgcgtcggcgggttgcttgtcttttcggctgtcattggcgcttttcggcacgcagatacgccgcttcggcgcggtggcggtgcttgttcccgtagccgccggtgcgatcctggccgggatcggagctgcgtggctgtacggtgcggggaggacgcccgccctgttggctatgatggcgtttactgagctgtatccggttgcggtcggcatgtgcgcggtgtcggttcttgcgggggactctcttgtcgaggtgcagggatcgacgccggttggctttcgctcggttcagacggtacgccttgtcgttgtgctgatcgggggatttctcggggccattgcgatgttcgccccgcttcatctgctcggcatctatcctcgcgataccggctgggcaagctttcttttccccgctggcggcgcggcggttatggcttttctcgcgtattcggcggtatcgctttccggagcggcggcaacggcgagtctcgccgttgccgccgcctggttgtttctcgcgctcatctgggatccgaacatggtgtcgctcgcttcgcagcgcggcatccctctgcttgccgcctgtgctgcgtgctcgttcgcgtggcgatctttgggcaacgtggagcgggcgttgctgaaagcgagggatgcgcaatgagctttctcggccttgcgctgactcacgcgcgcattgcggggcgccagcgcgcgctctggattgtgtcgatccttttgacggttctcgcggcgacgctcaatgtgaatacggggctcgccttcgagacggacgatgttgccgatcttgcgtttctggcgcagcttcttgccttgctgccgcccattgcgtacgcagccgcgttcaccgatctggtttcagcgcccgcgcgcctcggcattgcggaggtcgaggcgtcttcgccgacgtctcccgcgatgctcgcggttgcacgggttatcggttcgctgctcgtggttgcccttccttctgccctcgtgctgctgttctgcgggtttgctcagacggctcacggcaatcagtgggcggtgctgcaggcggtgtccttgttcgccttcgtcacggcgcccggggccttgctggcgatgtccctctcttcgcttgcgggcacggttttgccgagggcgatcgcgcgcatagcggcggtcgccgcctggtgcgtggcgatagggctcactacgtttgttccgacgcccgagcctgggggagggttcaagatccatctggcttccgatgccgtgtgccaggcgtttttcggctgcagccccctgatggaccaagcatcggccaacgttgcggcaagcgcgccgatcgaggcggtcgttgcgttggcggcgaagctggcgattgcgatagcgctccttttgcttgcgggcgctctatcgcgaagccgggcgtatcgacgcggatagcgcttttactgcatggaatcgaatcggaaggatcagcatgttcattacggtggatcaccttggaaaagattttcggaagaagccgggcgcccttgaggacctgacgctcgatcttccttcgggcatgatcggactcatcggtcccaacggcgccggcaagacgacgctcatgcgcattctttgcggcgtcgtgagtccgacgcgcgggcgcgttttggtggatgggtgcgatatggccgaatcccgcacgcggcgggctctcaaaaagaccctcgggtacctgcctcaagacatcgagccctacccgaacctcacgcctccggagtttctcgattacgttggcattctcaaggggatggatgacgggcgagtccgccgccgtcaggccgacgagcttatcgagcgcgtgggtttgggagatgtgcgacggcggaggatcggcggtttctcggggggaatgaagcgccgcgtggggatcgcccaggcgctcatgggcgatccccgactgctgatcgtcgatgaaccgacggcgggcctcgatcccgaagagcgcatgcgcttcaggacgctcatcgccacgcttggcagtgatcgcacggtgattctatccacccatattctcgacgatgtggctcaaacctgtccgtacgtgtgcgtgttgcgcgccgggcggcttcgcttcgaaggtgcgactgcgggactcatcgaagaagcccgaggccgcacctggctgacgcctccgcttgcggtgccgcccgcagatgcggtcatcgtgaacgctgcggcttcgccgcaggggacgtgctatcgcatcgtatccgatggcgcgcccgagggcgcagtgcccgttgagccgacgctcgaggacggctacatggcgcttgccacgggtacgagataaggcggttgcgtcggatttgggctgattcgggttgcatcaaaccaaactccgcgatgctgcggtatcattgccgtatacgtgaaacatgcatgtcagagcgccgcgtgctgcggatgcggcgcctatgcgaatacggagggcttaccatggcaaaaatcgaaatgaccacgccgcttgtcgagatggacggcgacgagatgacgcgcatcatctggcagatgatcaaagacgagctcatttctccccatgttgatctgaagaccgaatactacgatctgggcctcgagcatcgcaatgccaccgacgaccaggtgacggttgattcggctgaggcgacaaagcgtctgggagttgcggtgaagtgcgccactattacaccgaacgctgcgcgcatggatgaatacgacctcaagaaaatgtggaagagccccaacggcaccatccgcgccatgctcgatggcaccgtgtttcgcacgcccatcgtggtcaagggcatcgagccgtgcgtgcgcaactggacgcgtcccatcacgatagcccgtcatgcatacggtgacgtgtacaagaacgccgagatggtcgttcccggtcccggtacggtggagctggtctacaccgcggccgacggcaccgagacgcgcgagctcgtgcacgaattcgacggccccggtatcgcccagggcatgcacaacctcgattcgtcgatcgggagctttgcgcggagctgctttgagtatgcgctcgataccaagcaagatgtctggtttgccacgaaggatacgatttcgaagaagtatgaccatcgcttcaaggatctgttccaggaaatctacgatgccgagtacgccgagcggttcgaggcggagggcatcgaatatttctacacgctcatcgacgatgccgttgcacgcgtcatgaaagcagacggcggcttcatctgggcgtgcaagaactacgatggtgacgtgatgagcgatatggtgtcttccgcattcggctcgcttgcgatgatgacttccgtgctggtttctccccaaggcgtttacgaatacgaagcggcccacggtacggtgcagcgccattactacaagcatctgaaaggcgaggagacctcgacgaattccgttgcaaccatctttgcgtggacgggcgccctgcgcaagcgcggcgaactcgacgggctttccgatctggttgcttttgccgatcgcctggagaaagccacgctcgatacgatcgaggcaggggagatgacgggtgatttggctcgcatcacatctttggagaacccgactgcgcttagcacgcatgggttcatcctcgctattgccgagcgcctgagggcgtaaggcgcacgagggccccgcgatgcgtcccgcggggtcagccgtgcaacgataggtatcgccccgtaacgcttgccgggttggcggctatttcttcgggtgtgccggcggcgacgatgcgaccgcctgcttcgccgccgcccggtcccatgtcgatgacgtaatcggcgtttgcgatgacgtcgagatcgtgttcgatcactataaccgttgcgccgcgctcaacgaggctttggaagacttcgagcaaaacgcgaacatcgaggggatgaaggccgatggtcggttcgtcgaaaacgaacaccgcatcgccttgcatgcgccccatttcgcttgcgagcttgagccgttgcgcttcgccgcccgagagcaagggagttgcctccccgagcgcgaggtagcccaaaccgagatcgcacagggtttgcagctttccgttcgccctcttcaggtcggcggtatgtacgcgcgcttcgtcaacgctcatgctcataagctgcggaagcgaaagccctctggctgcgccgtctttttccggccggtgaatgcgcgcggcctcttcgccgtagcgggatccgccgcatgcgggacaggtgatgtccacatccggcaaaaactgcacatccaagccgatggagcccgtgccatcgcacacggggcagcgcagcgatccggtgttgtaggagaaatcgcccgctttgagtcccatcgcccgagcttcttcggtgcgggcgaaagcgcgcctgagttcatcgtgcgcccccgaataggttgcaacggtcgatcgcacgttgattccgatcggcgtagcgtcgatgaggtttgcgcgcgtgatcccgtcggcgtcgatgcgctttatatgagagggcgtgttcgcaggcgacgctattgatacgagcgcgggaacgaggctttccagcacgagggttgttttgcccgaccccgatactcccgttacgacggtaaggcgtccccggggaaagtcgacctcgaggggccctacggtgtgcagcgcttcggtttcaagatggatgccgccgatgtcgaacatgctgtgcgaacgcgcccgctcgcgcacgcgtaccgactccgcgcccgagaggaatccgccgatgcgcgaggcgggattctgctcgatatcgctcagggagccttgggcgatcacgcggcctccatcgctgcccgccgagggccctatttcgatcagatgatcggcttgcgctaggatatgggtatcgtgatcgaccatgacgattgtgtttccgtcctctagcagatcgcgcatgactgcgaggagcccgtctatgttcgaggggtgaagaccgatggacggctcgtcgagaacgtagagcacgccggtcgtgcgatttcggacggcgcgggccagctggacgcgctggcgttctcctgtcgacagcgtggagcttgcgcggtcgagggagaggtaatcgagccccagatcggtgagcctccgggctgtatgggagaaggattcgcagatgctttgcgccagcggtctcatttcttcgggcagggtttcgggtacgctggagacccactgcgtcagatcgcccagggttttttcggtggcctgcgccagatcgatgcccgctacgtgcggttcgagggcatgctgggagagacgcgttcccttgcaggtggggcaggggccttccttaaggaaccgcgatacccgtttgaggcccttttcatccttcgctttcgagagcgcattctcgacggtttttacggcgttgtagtacgtgaagtcaagttcggcgaaggtatcggttttcttcgccttgtacagaatgtgcttcttttcggcgggtccgttgaaaacgatgtcgcgctcttcggaggtaagttgattgaacggaacgtcggtgcgcacgcccatttccccggcaacctgcttcatgagatcccacatcaaagtgttccagggcaacaccgccccctcgtcgatggagagcgactcgtcgggcacgagcgacgctttatcgaccgtgcgcacaatgccggtgccctcgcattcggggcaggctccatcgctgttgaatgccagcgactcggctcccgggccgaaaaactcgacgccgcattcagggcatgttataggttgctcggctgcgacggcaagcgttgggggcacccgatgcccgttggggcatacatggctgccgacacgcgagaacaggagtcggagactgttcagcagctccgtcgatgtgccgaatgtgctgcgcaccccagcgatgctcgggcgttgatgcagggcaagcgcggcaggtacgtggaggacttcgtcgacgtcggcgcgacctgcttgcgctatgcgtctgcgcgtgtaggtggaaagcgcctcaagatagcggcgcgagccttctgcatagagaacgccgagggcgagcgacgatttgcccgaccccgatactccggcaatgccgacaagctgattgaggggaacgtcgacatcgatgtttttcaggttgtgcacccgtgcgccgcgtacctcgatacggtcgggcacctgactggacgagtgggggacgggtgcgcttgcgtctaggttggtcatttttgcctcacgggttgcgaacggatgctgcccgttattgtaccgcgtaacggggaggaagatcgcgctcgcaaccgttacgggcagatggctgttttcgggtagaagaagttttggttagacgatggagacggccggtgcttcgaaatctattcggtgagcggtaggtgcggtaaacctgcatgaaaccatggcgggtgacgagatttctgcatggcctgtgcgggagcttccattttttgacggcaagcggctgggaggcgtgttccggcatatcgaaaatatggcgaaacacgaattgtgcacctgcacaaaactgtataatgcagccttcccgaaagaccgagggtcggcggccgaacggtacgccccttcgtcgggagatgggcctgtaaggctcggttcgcaggcaggcaggcgaaacatcctaaaggagggcactatcatgagcggcgataacgtggtattggcaagaaacacggatcaggcaccccgaagcccctactattcgcaaacggttgctttttcccactacaataatttttcagcccagcttccgattgacccgaagacaggagagctggtgccgggcggcgtcgaaaagcaagcggagcagtgttttaggaacatcagggccattgcggaaagcattggccacagcatgaacgacgttatcaggattacggtgttcgtcacgaacattgaagacgttgacgcaatcgacggcgtgtaccgatcgtatttcccgacgtatcttcccgcccgcacgacggtggccgttgccgctttgccgatggacgcttcggtgttcgtcgaggcgcttctttcgaatggggagggcacgatcccgaacgctcctcaggcgggggatctggtcaagctgacgaacaacacggcgaatgcgccgatcgatgcgctgtcgacccagacggtcgccttctcccactacaacaacatctcggcgcagcttcccgttgatccgaagtccggtcagatcgtggttggcggcgcgagggagcaagctgcgcagtgcttgaaaaatatcaaggcgatcctcgaaagcatcgatgtgcctttcgacgatatcgtgaagacgaccgtttttctcaaaagcctttcggacatcgaggcggttgacgaggcgtatgcgaggttctttcccgattccggcatcgcccgtgccgtggggtatgtccccgcgcgaacggttatcgaggcatcggcgttgcctttgcatgccctggtgcagatcgaagccgtcgtttcgcatggcgacggcacgccgcctcaggctgtcgaagacaggcacgggcttatcgtggaggccgccaacacggcgaatgcgccgatcgatgcgctgtcgacccagacggtcgccttctcccactacaacaacatctcggcccagctgccgatcgatccagaaaccggtacgctggtttccggaggcgttgccgaacagaccgctcagtgcttgaagaacatcaaggcgatcatcgagagcgtcggtcatgcgatgggggatgcggtcaaggtgaacatttgccttaggaacatcgaagacctcgatgccgcaaacgaagcttacgctgcgttctttcccgagggaaagcctgcgcgaagggtgatcggggtcgggaatttgccgatgggggctctcgtgcaaatcgatgcgatcttcggaaatgccgagggcacgcctccgacggcgtaagttcgcgacatacagccggtggtggaaacgcgctcctggggttcttggacgatctcgggagcgcagtttcggctatcttgccccatggcgctacatcttttccttcaccatggtgagcgagatttttccccgctccttgtctatgccggtcacccagacggtgacggtgtctcccaccgatgccgcttcgctcgggtgcctgacgaagcgatccgccattttggagatgtggacgagcccatcttgtttcacgccgatatccacgaacgcgccgaaatcgacgacgttgcgcacggtgcccgtgagctccatgcccacggagaggtcgtcgaactcgcgaacgcttctgctgaatacgaccgcgggggcgtcgtcgcgagggtcgcgccctggtttttccagctcggcgatgatgtcttggagggtcggcagccccacgccgagctctgtcgccagcgcggatgcatcgccgacgcgctctgcgatatcgggtatgcccccgcgggtcagcgcttcgggtttcaggttgccccgtttgagaacctcgcgtgcgacaggatagctttcggggtggacgctcgtcgcatcaaggggattcttgccgccttcgatgcgcaggaatcccgcgcagttctggaaggctttggcacccagcttgggaaccttcttgagttctctgcgatcggaaaacgctccgtgctcttcgcgataggcgacgatgttcttcgctacggcggcgttgatgccggaaacgtagccgagcaggctcacgcttgccgtgttgagatcgacgcctacgcggttgacgacgttttcgacgacgcccgtcaaggcgcgctcgagcgcagcttggttgaggtcgtgctgatattgtccgacgccgattgactgaggcgggattttcacgagctccgcaagcgggtcttgcagtcgacggccgaggctcatggccccgcgggtggttacgtcgaggtcagggtactcttcgcttgccaattttgacgccgaataaacggaggcgcccgcttcgttgacgatggtgtattggatgggctcgttcgattgcgcgatgaaatcggctacgacttcttcggtttcgcgactgcccgttccgtttccgatgacgatgacgttgacccgatgcttctgcacgtaatgcgcaagcttgcgttgcgtctccttgatttccgaacgagggggcgtggggtagacggtcgtgtagtctaaaagtttcccgtactcgtccaagacggcgagtttgcatcccgtcctgtatcccggatcgagcgcgatgacccgcgctccacggacggggcgctgctgcagaagcgcttccgtgttcttggcgaacacccgaatggcatcggtttgggcgcgatcagtgagctcggagcgaatctcgcgttcgagcgagggggcgatcagtcgcttgtaaccgtccgcaatagcctccttcagggcttgggtgaaaggcgagccgttctgcttgaccatgcgctgttcgagccgtgcgatggcagcgcttgcatccgcctgcaccttcaccttgagctttcgctctttctctccgcgatcgatggcaaggattcgatggttggggatcttcgtgatcggttcggaaaaaccgtagtatgcgtcgtagacggttttctcgtcttcgttgatgccctcgacggcgatggcaccctgtttttttgtgaggtcgcgcagcgatgcggtgtgttcggcatcgtctgcgatggtttcagcgacgatgtcctgagctccttgcagggcggcttcgggtgagccgtacccgctatcggcgttcacgtattgcgccgctatcgccaaggggtcgcagcgctgcggatcctgcgcgagaatgagtgcggcgagcggttcgagtcccgcatcgcgggctttcgaggcgcgggttgcgcgcttcttcttgtagggcttgtacaggtcttccactcgctgcaataccgtggccgcctcgattttcgaacggagctcgggcgtgagcttcccctgctcttcgatcgagcttagaacctcgactttgcgagcttcaaggtttctgaggtaggttaggcgctcgtcgaaatcgcggagcgtcgcgtcgtcgataccgcccgtcgcctccttgcggtatcgcgctatgaaaggtatcgtgttgccgtcgtcgaccagatcgatgacggccttgacttgcgcaacgctcaggttgagctcttgcgcgatgaggctttggatgttcggcactgcttctttcccgctttcggcttcttcgatgttgatcttcgatggactctcgtgcggccgagcgcgtcggccgacacgtcattatacgtgacgggcgccgaaagcagtatggcggggggcgattgaggcaacgccgtgcttgggcatggctttccgctcagagttttgccaacggaaaggaagatgcctacactggcgcgtaaagaagcctagccgatgttcgccgcaggcttggctgtgtgcttgtggcataatcatgctgaacggagaaagtggaaggaactcagcatgtcacggaaaagcgcaccgtctacgacgcgccgcacgcttcattatttctggttggtcacccgcaggcattgggggctgttcgccgcgctcatggcgtcgacgtttctgttcgtggcgttgctttcctacggcaatccctacgtgatgagcctggtggttgatcgcgtgagtgcgggcccggttggggccgacgaggtgttctcggtgttcggcccttacattgccgcgctcatcggcatcaacgtagccggccaggcggcgagcaagctgcaggattacaccatgtaccggctcgagatcgcagcctcctacgatttggcaaccatgtcgttcgatgcgctgtgcaaccaatccatgtcgtttcattccaaccgcttcggtggtacgctcgtaagccagaccaccaaattcatgagctcctaccagatgctcttggagaccgtgacgtttccttttctgccggtcatctgctcggttgtgttcacatgcgccatcctcgcgccgcgggttccggtatacgtggccattctcatggtgctgctcgcgatctacgcgggcgtgtcctactacatgtacaagcgcatcctgcgcctgaacgaacaggccgcgagcgcccagaaccagctctcgggcgagctttccgattcggtggccaacatcctcgcggtgaagacctacggacgggaagactatgagaaggggcttttcgacgaggcgaaccgcgaagtggtggcgcgcgactccaagcgcatgtgggcttcgcttacgcgcggcatcgtgacggcggccatcaccattgccatcatgagcgtggtggcggtgttcatcgcgggcggcaacgcctggtacggcatcacgccgggtacgcttgtggtgatgttcacctacacctacacggtgacgaaccagttcaacttcatcaacaacggcctgcagcgcttcaaccgcgccttcggcgatgcgagcggcatgaccgtgatccttgacgagccgcggcttgtggatgacaagccgggggcgccggaactcgtggtgagcgaaggggccatcgacttcgagggcatcgatttctggtacaccgacggagatgcgcgcacgcaggtcttcgacaagttcgagctgcatattcctgccggccagcgcgtggggctcgtcgggatgagcggagcggggaagaccacgctcacgaagcttttgctgcgcctttccgacatccaggagggccgcatcctcgtggacggtcagaacgttgccgacaccacgcagcagtcgttgcgccgccagatcgcctacgtgccgcaggaggcgcttctgtttcaccgctccatcgccgagaacatcgcctacgggcggcccgagtccactatggacgagattcgcgaggcggcgcgtcaggccaacgcgctcgagttcatcgagcggcttccgcagggctttgagaccgtcacgggcgagcgcggcgtgaagctttcgggcggtcagcgccagcgcatcgcgatcgctcgggcgcttctggcggactgtcctgtgctggtgctcgacgaggccacaagcgcgctcgattcggaaagcgagcagctcgtgcaagatgcgctcgcgaccctcatgcgcgggcgcacttcgatcgtcgtggcgcatcgtctctcgaccgtggcgagtcttgaccggatcgtcgtgctcgaagggggcaaggtggtcgaagacggccctcacgccgagctgatcgcggccgaaggcgagtacgcccatctgtggggcaggcagaccggcgcgtatttggaggaagagggctaaactctgcatttccgccacgccggcgtctaggggggacggataaggcggatgccctttgctgccttagcggagctggcgagtcgtcaggggatgtcgtgattggcgacggccttgtgggtatcgagacatcgatggcgagcggcttgtttctgccgattacgtcgtggtggctatcgggtcaaggccgcgtgatgctcgagccatcgaaggatactgtgaaaaagcgggtattgattgcgtttcgataggtgacgcgaagcgcgcccggcgagctatagacgcaatacgggaggcgtacgacgtggcgcgctctttctaatggcgcggcttgcggcatcatgcatgagcagaagcgctcttgcgcagattcgcttgtgattgtgccggtggagtctttggtggaaatccccggttggtgccgagggcagtcagtgatacgatgtgcacgtcggtatcgagtgcaagggagttgcaatggagaaagaactactcgaattcgtagctgagcgcgctgaggtcctctctgtttctggagccagcaagcaagagaccaaggaagccgcgcttgcgtggaagagcgtcgccgaaggtgcagacgacgaggcgctcgaggccgccaccgctgagtttatcgactttctcgaggggcgaccgaacaccgtggacggggttatcgctttcgcgcaaggtcctgccgtcgagatgttcggcaaggaagccgccgatcagattctcgcccaacagcttgagcgcaaggagcggggcgagaagtactgcgactgcgatgcatgcacggccgcggtggagcttctttccaagttcgggcggatctaggctgggttgtccgaacgaggagttgttgttcggcgcggcgtggaagatcgttaaggcatttgggctgaggctgaagacggtaactgcatggcgctttcatggtggtttagcgatggcgtcttccgtcgagatgtcggttttgaacgtcgtccgggttctttcggttgatgcgctaacgggagcgcaaaccccgccgtgttcggaaccctccatgatttcttgcggttcgcccagatcgaaattaaagccatccccaatactgattgcagcggcttcgctgaggatacgagtatgccgcctttgatgatgaaatcattgctgtaattcgaaaccgaaaaaacgttcgagaagccttttctttgcgaagtggcgcaatagcctctgcgtctttccgctgtttccttcggcgtggtttcaaatatgctatcatttttcttgtccgttcataatgtcaatctcagcaggcatttcgataatgaaagaggctccttcgccgagggagctaacaacgctgagggttccttccatatgttcgacaatctctttggcgataggtaatcctacacccgttccttcggaagagccggagcgatttttggtgtagtagtattcgaaaattaccgcgcattcctcttcggtaagaccgggtccctgatcgttgacggatatgatggcgcgatccccatagagggcggcctcgactttcaccgttcctttggcgggggagtggcggactgcgttatccaccaaattttgtactgcctccagaaggcgcatttgatctcctacgacgataatgtcctcatttgccgagagctctacggctacgccaaagccatcctcgtaggcgccccaggattccgctgcgctttctagggcggttttgaggttgatgggatcctctgcgaacaacacgcgattctcctcgagttttgcgagatggaacaggtcgttggtcaggctggtcatgaactcgacgcggcttttgatggtcgtggccttttctgtggcggtctcggggttctcgatgatagcctctgtgcagcctttcgttacgaacagcggcgttcgcaggtcgtgaaagatgttgagcatcatttggcgtcgctgagcctcttttcgccttagctctttcgtgcgctgattgactagggagtccaactccgccgtcaagagctcctgctctttgaatttcttagcgaacaagcggtttacgctgaacatgactaccaaggcgaaaggaaggctgaagaggggcgctgtggtgaagaggatgcagaaggcgaggctgttcgataggtgaaggaacccgaagaaagtcgcattggtgctcaccagcaccgagatgagcaaaactgccgcaatcagggtgtcctttggctttgcgattatgcaaacgtagatagagacgatgagagcaagggtgttgtagacgagggcgaggtaaggctccgccgttgaaccgaaaatccaggcaatcgcggcaaacgccaatccggatagcacggtcgcgcgtccgctgaacagcattcgaacgagctcgtttatcttcacgtccataaggcggaaagctatgtagaaggaaagcatataggatactacgcgggtgaatacggcgaagggccttcctaccgcgctcagctcgatggcgggaacgttccacgcgctggtgaagaggacggcttggcacagcagcaccaagacgtaaagcacgtatcgaagcatgtagtcttcgctgggtttgtaatagtaaagtgttgagccgtaaagaaccatggcaacgagcaggccgatctcgaacaggctggtatatgtcgagatggccatgaggtggcccatggactcctgggggccgatgtacaccactccggggcccgtggggtttacctcctctaacgtcagtgaaacgcttcggacacgggcgggttgggagtcgtctagaggcggcaaggggatggcggcagaagaaatcaaagtgttttcttgggaaaactcagcctcgcttattacttcgccttgttcgcggatgcttgccgtctgagcacccttgccagaacgaaacgtcaggagcgagatttcagagacatccggatcaacggtgatgttcagatgtaaggtgtgcgtgctttggtcgtacgtttcgcctatgacgcgactggcggccgtgtccgcatgcagaacgtctgttgacgctgagaagatgggttgagagtcgcgcatgacgacaaaacaggaatacaggagcgccgaaatgacgatgatggcaacgaggcttccgatctttttcgctgcatcatctaggtgggctttggaatcgggagtcatctcaggtccttctcttgcacgcctatgaatgacaaaatagtatcatggggataggcgagggcgggtaatgtaaactgggatggggtatgcaaatctgtttctcagcacgtgggtcgtcggatgtggcgccgcaatgcaggtcgagaaaagcggttccggggttttggttgacggggaatcagtgctcgtcccgataatgatttcttgcatagtacgttgcgaaaggggcttcctatgccaaacgatgtgcttcttgtcgaagatgaccgagatatagccaatatcatcaagcgctatctgagcgctaccgagtttgagcttacctggtgctccaatgtcgatgcgatcgatcagctggaggacaagtgctttgacgtagtattactggatatcatgctcggcgacgcgagcggcctggatgtctgtgcacgcctgcgtgctcgttacgattgtcccattattttcgtgagcgcaatcgacgacagcgacaccattgtccgcgccctggaaatgggcggggacgactacgtaaccaagcctttcgatgctcaggtattagtggctcgaatcagggcgaatcttcgtcgtgcgggaagcttccatcgcgatgagcagttttgcgaatcttacgagtgcgagggctttaccttcgatgcgcgcgatagaacggttaccaccaaggacggtcgcacatccaatctcaccccgctggaatttcagctgctgctgtttttgattcgtaatccggagaagtactacgcttctgaggagctttacgccaatatttgggggaagcgctgctatggcgatgcgcgcacggttatcgtattgattcatggcttgcggaaaaagatagagagcgaccctcgggctccacggcacctggtcaacaagcggggtcgcggctacggtttcgttccgtgttcatagcggtttcgtcgcggcgcgcggcgacatttcatcagcgcgatctattttaagccttttttaacacaaggccgtttcgctatccattattctgctcgtgttgcaagccgagtttctcggcgatcgtgaaaaatgcggcaacgaaaagggattgccgctgatcgaacggagggaataatggaactcagtcgtcgtaatttcttgatgggatctgccgtcgcggctgctgcgggcgctttcgctatggctggctgctctccgcagggcaataattctgagcctgaggccgacaaagttgttgaggctgccggcgacgccagcaaccataccatggaggccgccgaaaccatcgagtgcgatctggtggtgtgcggcgcgggcatctccggcatgtccgctacccttgagggcgttgcccagggcatggatgtggttctgctggagaagctcgagaagcttggcggtaccctgttcggtaccgagggcatcatgggcgtcggctcccagattcagaaggacatgaatatcgaggttccttctctatggcccgttattcagtcggagctggagtggaccaattggcgcaccgatcccctgatctggcaagacttcatcgccgaatctggggaaaatatcgacttcctggtggcgaacggtgcaattatccccagcgtttcgggctttcccaaggccggttccttccagtgcttccatgaatgggaagaacgatctggcggtcatagttccgagctgttggccgaggctaccatgaattgcggcgcccgcgtctacaccaagactcccctgactgagctcaaggtggaagacggcaaggtcaccggcgtatacgccacccgtgaagacggctccatcctggaagtcaacgctaaagccgttctgattgcgtctggctccgcatccgataacttcgagcttatcgagcagcgctcaggcatggtgttccccaacgctgtttccaacttcggtatggagtggaccggtgacggtattattttggccgcaaagtacggcgccaaagagatgcccatcatccctcgctgcaccccgggcgcagccgacgttccctcgaatagccctctgtcccagttggctcgcattgagcccatgagcctgctcatcaaccccgagggtctgcgttacgctcccgagaccatcattctcgattatggccagcccgtgttggttaacgttcttggcgggcagcagggcaagacgtggaccattattgatgaggcgaccgtcaacgctttggagagcgagggcgcaaacgccgtttcaactgttggctatcgccccggcgacaacattgagggcttgaagcaggctttcgaggatgagattgacggcggcaatgacttcatagcctacggtgagaccctggacgagctggcggctgccatgggtgtggatgcggagaacttcaagagcaccgttgctcgctacaacgaggtctgcgcgctcggcgaggacgttgatttcggcaaagatcccgagtatctgcatgccctggaaaccggcccgttctatgccgtcagccccatcatgaacttcttcggtaccttgggcggcatctccgtcgaccgttccatgcgcgttcttcgctccgacggcaccgccatcgagggtctgtatgcatccggtgtttgcgcttgcgacctgtggaaggagacctacaacgtgaccgtttccggcggtcagaacgcttactgctgctacagcggccgccatgccgcccaggtggtgaaggcgagcttgtaagcctcgggcacatgcggcctttgctttgaaagccgccgggcattcgctcggcggcttgagtgcgagggacgggacgagaagcactgcgactgcaatgcatgcacggtcgcggtggagctcctttccgagttcaggtgggtctaggccgacctgccagagcgggagtccgaggacggtgttggtcgtattggatgaagatcgcccaagcgggaacggctgcgacgttcgttgcgagcatgtacggctgcttcgtttgacatgtcccgggtccggcctgaccttgcggcaacggcaaccatgaagttgcggaatttgcgctcgtccttgaggttggcaagtgagtgaacgtcgcgctctggtatgttgcgcggtatttcaccatcgaaatcttctggtgcaagaatcgcctcgtatgagaaaccattgggcagcgggtattcgctggactccatgattccgattgcgtattcgtgcgtcgcttcttcaaggcatcgagcatctctttggatagcatgttttgttatggctctaatttatcgagaatggcttcgtatgtttagggtatgaacgtcaacgtggccgtcaacaagagctactcgtctcttcgccttctcgaccaactcagtcaggattttaagggcgccgtagatctggccgttaaagaaaatggtctgcggggcccttttggcatcatgggctttcggatatccgaacacttgctcgaagcgttcgtcggtacgatgccgatactcaatctggctatcttccatcacgtctattcgttgcaggagtctggcactgttggcattaaacgccgcatgtcgacgaacgcgtccatgattgtaatgtttgtcggaacagctgtgtcgctgctttaagagggcaatctaatggtacgcaattgcgctcagcattgtctgggaaagcgggaggtaagcttattgcctcaatagctgatcgcgagtgccagtgcgcagaaaaacagcagtcatcattcaggccaagaatgcctgcaaggggtaggttgatagggaacctggccttcgccttgcaggtaatggcggcgacgatcaagcatcgcgatcgctttcgatagggttcttattctggtctcgcagcttgtgctttcttttgaaagggtgtattattttatttaatacaactgtattaaataagggaagtgatgaagtgctgattggcttgattgtattttgcgaggtcatgttttgggtgtttatcgtatctggactctttgcgcgatatgttttgaagaagaaaaagcttggcatggtgctgcttgctctctcgccggtggtggatgtggtgttgctaggggctaccgcagtcgatttgcatggcgggggagaagcagcttttgcccatgcgcttgcagcaatttacctaggagtttcgcttgttttcggtaagaagatggtggcgtgggccgacgcttggttttcctatcgttttgcggacggcccgcgtcctcccaaaaagccgaaagcaggaaaagcgcatgcagcgctagagcgcttagggtggctgcgccaccttgcggcgtatgcaatcggctgtgtcataatgggagttctcacggtgatttcctcaagccaacaggcctcagaggtattctttggaactatgggcacctggggaattattcttcttgtcgattttgcaataagttttagctatacccttttcccgcgaaaggaaaagcgggcataggagccagacatgccaaagattgtagatgaaaccgccagacaacaagcaataggccaggccgtttggcgtattgccgagaccgagggtctgcaccaggcaacggtgaggcgtgtggccgaggaagccgggctttcggtggggtcgctcagaaggtctttcccgacccaggcaagcctgtacgaatacgctatggcgttgataatcgagcgacttgagggtcggcttggcgatggaagggggattgcgcaggtagctcccttggagcaagttgttatcttgctgaagaatttccttcctttaggggatgagcaggccgccgagatgcgtgtatggctgtctttcagcgcggaagcgcagcatagcgtggcgctacgatccctcaacgattccatgtttgatcgtacgcgcggatatatggtctcagtgttgcagtatcttgtagagcaagaagttcttgccgaggacatcgaccttaacaaggaggcaggcgcattgcatgcctttctcgacgggctaacgcttcactgtcttttgaggcccgaggtggttacggaggaaaaagtcgatgaggcgctgagaagttactttgatcggatgatcgcttgattgcgaagagggcctttaggggttatcgcgcaagaagaccggggtattcaaatttgttcgtccggttcaagtggcgatagaattcgagctagcgcgataaaaaagacggattgccaaaacaagcaatccgtctttttgttcgttcagttgcagcaagagcaaaacctcagcttcttgctttactcccactcgatcgtgccgataggcttgggcgtgagatcgtagcacacacggcagatgccgggaacctcggccaggatgcggtcggtgatcttcttgagcagcgcccaatcgagttcgggaacctcggcggtcatggcgtcgacggtgttgaccgcgcggataatggcaggccactcgaacgcgcgcactccgtcgcggacgcctgtcgcgcggaaatcggggaccgtcacgaagtactgccacaccttgccctctaggccggctgcggcgaactcctcgcgcaggacggcatcggcttcgcggagtgcttcgagccgatcgcgcgtgatggcgccgaggcagcgcacacctaagcccgggccggggaagggttggcgctcgaccatgctctcgggcagtcccagctcgcgacctatcacgcgaacctcgtctttgtacaggagcttcacaggttcgcaaagctcgaattgcagatcgtcgggcaagccgcccacgttgtgatgggccttcacgccgtcggattcgagaatgtcgggatagatcgtgccctgggcgaggaagctcacctcgtcgcctactttgcgggcctcttcctcgaacacgcggatgaattcggcgccgatgatcttgcgcttcgcctcgggctcggcgacgccgtcaagcagcgaaaggaagcgatccaccgcgtcgacatacacgaggttcgcatcgagctggttttggaacacgtcgacaacctgctcgctttcgcctttgcgcatgagaccgtgatttacgtgcacgcagatgagctgcttgccaatagccttgatgaggagcgctgcgaccacgctcgaatccacgccgccggaaagggccaacagcaccttctgatcgcccacttgggcctgaatcgcttcgacctgttcgtcgatgaacgcttttgcctgttcgggcgatgcgattcgctccatatcatcggggcgcttgttgggatccattcatgtcctcctctgggtcgtcttttcgtatgaggggattatagcgaatcggcaggaccgtgttgcgacagcgcgtcggatcacgatgatcgtcacgtaatttacggtattgacgcgcggttcgcgcagatatatattacacttgtaatataacatatgtaatatataggaggctgtaatgcccgagcaaagggtggcaaaggtcagggtgctcgacgccgcgctaagcatcgtgcgcgaacagggggaagaagccctgagcgcgcgggcgatcgccgagcgtgccgagtgttcggtgcagccgatctacagcttgttcggcgatatggccgctcttgctgaggagctgtacgaccatgcgcgcgcatgggtagccgcctacaatctggagcacatgcacgacggggcgaatctgttcgaggcgaacggtttctcgcatctgcgcctcgcgaaaaccgagactaacctctttcgcttcctgtatctttcgccccatatgcaccccgaaggcttcgaggagctgttccaaagcgttgctctcgatggggtggaagactgcatccaagacctggggcacctttcggccgaagcggctcacgaactctatctcagcatgatcgtttacacgcacggcatggccgctatgatcgcttgcggcgcacaattcacagatgccgatctgcacgaacgcatggatcgttcgtttcaggcgttcgtggcgcagatcagggaaggggagcgaagctgatgacggcaggcgaaggtgcggccgatggggccgggcggcgtagggcggcatctgcggaaaacggagcttcgcgtttcatcggcggtcgccctcgtaaacacggctcgggtgcggtccgtcagcgcgttcggcgcttgctgttgttggtgtcgtttcttctgttcccgataacgatcttctatttttcgccggtgcttatcatcgaaggtgcgctaacgggcgtggtcgtggcgagcgcgctcgtgttcaccgcgcagttcctgctgtcgctcgtatgccgtcgcacgttttgcgggtggctgtgtgcggcgggtggtttgcaggaactcgagtccacggtagtgggaaagcccgcgaagctaggatggcgcacgcgcatcaagtacgtcatttgggtgccgtggctcgcctccatcatcgtctgcgcctgggtggcgggcggattcaccctgatcgatccgttggccggtatcccaggcggcgtatcattgaacaacccgctcgggcttcccatctatttcggcatcgtggcgctgtttttcgtcccgaatttgtttttgggtcggcgcgctatgtgccactgcgtctgctggatggcaccgttcatggtgatcggtggcaagcttggccgcgcggcgcgtttgcctcaactgcgcatcgtcgccgaacccgaagcgtgcatcgcatgcggcagatgcacgaaggcatgcccgatgagcctcgatgtgcaaaagctgcttgtgtcgggcgatatcctcgatgccgaatgcatccaatgcgcggcgtgcgcggatgcgtgccccaaagacgtgttggccctgcggtgcagccgataacgtcgcagcgcaaatggcgttcttacagccccttgatagaggctcctgcgtgatagtggcctttttgctacgataagcatcatcatatgatctgcattgatcaatcattggagcgatcaggactcttcgacgaggtgcgcttctattcccgtacgggcgaatgcctgtatccggtaggtcgagagggcgtgacagccggtattgcactgcaagagatcttgttcggcctttggacgagcgaggaggagcagcactgcgccttccttcgagagaaactcgcggccttgcgagagtaagccgcatccgcgtgaccctctttgcggttgcacgaagatggcgcgcttaagcgaccggtcgcgagcaccgtcgttcgcggcgcatggtgccgaagggcgctgccgtgaggcgcggtctgctgcgggcggagctgctgcgaagcgttcgggcaatcccgccgccaacttctcgcaggtggcttatactggacgacagtacgcaagaatctgtgtaccgcgcctcgcgcgccgcatgcactgcgtcgggcaggacgcgcagaccgtgccgccgacgctgcgctgtcggtgaaaaggaggaaacatggcagtgatcttcgcgatcctcgcgatcgtcatcgttttcgtcgttgtgctggtggtgaatgccttgcgcctgaagccgacgccggtgagcgaccctctgccgcaaagttccgaatcgggcgacgatgccgccgtcgagcgcttccgcgagatgctgcgcatgcccaccgtgtgggcggccgaggatcccgacgccgatcatgagccgttcgatcgcttcgtgccgcgcatgcgcgagttgtatccccgcgtattcgagagcctcgaactcgagctcgttgaaacgtatggcatcatgctcaggtggccgggtgtgaactccgcgctcggtccgatcgttctcatggcccaccacgatgtggtgtcggccaatcccgaggaatggacgcacgatccgtttgcggccgatatcgaggacggcaagatatgggcgcgcgggtcggtggataccaagtgcattttggccgcgctcttcgaggcggccgagcgcctgctttccgagggctacgttccgccgcgcgacatatacctgtgctcgtcgaactgcgaggaggacaacggcaacaccgcgcccgcaatggtgcagctcttccgcgatcgcggcatcgaaccgtatatggtgctcgatgaaggcggtgcggttatcgataatccgccgcttggagtaacccgcccgttcgcggccatcggcgtaaccgagaaagggctgttcagcgcatttctcacggtcgattcgcaaggcggacacgcttcgactccgtcgcttgacgacgcgacggcaaaactcgtgtcggggcttgacgcgttgcagaagaacccggcgcccgctaagctctcgacgcccatcgaggccatgctcaaggagctcgcttcctacggcggcttcggcctcaggctcgtgttcggcaacctttggctcttccgtccgctcgtgctcaagatcatgaagggcgatcacgagacggccgccatggtgcgcaccacctacgccattaccgaactcgaggggtctcctgcggcgaacatcatacccaagcaggcgaagggcacggtaaacgtgcgcatcgatccgtccgagacgatcgatattgcatttggccggataaaggagcgtttcgacgatcagaccgagtacgacctgaggttcgccatcgatccctcgccgatatcgccgttcgatgacgcggcgttcgattatttgcgcgccgtgacgcatagcatctatccggatgccggcatcgcaccctacgttcaatcttcgtcgagcgatgcgcggcattggcatcgcatctgcccgcgcacgtaccgcttcgccggctttctgttcaaaggcgatcagcgcgcccgcattcacgggcaggacgagaacctcgatgtcgatgcgtacaagcgcggcatcggattctatatcgagcttatccgcaacctcgaccgtttgggaaagtgaggctccatgaccgaaaccacgaagccgaatgcggggcgggcgagcggggattcccgcaagggcctttcgcaaggcggaaaattcttctacggctggtggatcgttgcgggcggcctgctcatcatggcaacctgctacactgttttcgtcaactgcattcctctgttccaatcccatatggtcgaagatcttggcatcacggtggggcagttcaacacgggcgtgtccatctgcacggtcgtggcggtgttcgcttctctcgtgatcggcaggctgaccgataagtgcagcgcgcgagcgcttggcgccgttacggtgctcacgagttcggtggtgctcgtggctttctcgttcatcacgcagctgtggcagctctacgcgctctgcatcatcgccggcatggtggttgttgcgggcacgcgcctgctcgtctcggttctcatatcgaactggttcacactcaagcgcggcctcgccgtttcgatcgctctttcgggttcggggctcggcggcgtcatcctttcccctgtgacgagtgcgatgatcgtcgggtcgggttggcgctcggcgtttctgctgcttgcggtcatctgccttgtgtttgctcttccgatcgcggtgataatgtttcgcagccgaccgatcgataaggggcttgagccctacggtgcgggcgtcgtcgagaaggagaaagccgatcgctcccccgataaacccgtttcggtgtctatcgggtggaggcacctgcgcaagaacgcgggcttttggatgctcatcgtgggcttcgtgatgatgggcatcgtgaacggcgccatcatcaccaactcgatatccaacatgacatcggtgacgctcgacggcgtcgaggtggttaccggcgggcactcgacgatctgggcgggcggcgtgtggtcgttttaccttgccgtcgtcatctttgcgaaaatcgccctgggagccatttacgataggtggggcatgagggtgggcaccatcctcggtaccgtcgcttcggtgctcgcgggcatcgccctgtgctttcccgcaaccgattggggtccgattatcgcctgtctgttcttcgggttcgcaacttgcatgggaacggttgcaccgcccatcatggtggtcaaggaatatgggaagaaagacctcggtacggtcaccggcatcgtgaccgcgttcgaaatgttcggcgcggcggtcggcgcggtggtttcgggcatcatgttcgacgcgttcctgtcgtttgtgcccgtatggatcatggtcatcgtcgcgtcggcgcttatggggatcacgctgctcgcatcgattcccgcggcccgcaaactcgtcgagcgaaggattgccgaaggcgcccccgagctcgatgccgagggattcgagatagcgtccccaagcgagcaatcgaaagcgcgcgcctaggcgctgcgatccggtttgcttgatgcgccgtccggtttcgggcggcgcattcgttcgatcctgcacgaccagcatgcgcttgttcttgcgaggcgcttttcaggaggccatccgctctgcctccccgtcgattgcgcatcgaatggattcgttttgcattcgcgggagcaacgattgggcaacctggatgacacctgtgttacggcgatggaacaacttgctataaaaccgcagatcaaagacccaagtgaaaagaagggacaatacaatgaccttactgcatatataaagttcggttaaggagtcgtatgaaacgggtcagcgtcatcggtgccggggtgggcggtttggcagccgccatcaggctgcagcaagccggatacgaggtggagctttttgaaaaagagccgcttgtcggcgggaagatgaatagcatcaagggatcgggtttcgcgttcgatgtgggtccgaccatcgtgatgatgccctctttgtaccgcgaggtgttcgagctttgcggacgcgatcccgacgattacattccgatggaaagagtcgaaccgctgcttgagataagcttttctcccgaagagaggttgccgctttcgaacaacctgtccgatttgacggcgagcctcgaggctgtgagcgaagaggatgcggagggctacttcgaatacctcgccaagctgtacaagcgctaccgcatcgcgaaggacaactttcttcagcggccttttcgcaagccgaccgatttctacaatccccggagcctggtggcgggagttcggctccatacgctcggcgacgcctattcctcggtgtcgaaatacgtgaaagacgaccgcttgcgcaaggcgctcgcattccaaacgctctacataggcatatcgccctacgaagggccgtcgctttacatgatcatccccatgatcgagcttctttacggtgtgtggtacatcaagggaggcatgtattcgatggcaaacgcaatgggcaggctgcttgccgagatgggcggaatcgttcgcacctcgtcgccggtcgagcgcatagcgatcgagaacgggcgagccgtcggcgttgtcgcgaacggagaattgcatgaatccgactacgtggtgtgcgacgccgatttcccctacgccatgaaggaactcgtcgctgacgcttcggcgcgcggcaagtacacgcctgagaagatagaggcgatggactactcgtgttcgtgcttcatcatgtacctcggccttgacaagcgatatccgacgcgggctctgcattcgatcaggttcgcctccgattttcagaagaacatcgccgatatcttcgatgacgcgcggtttcccgacgacccctcgttttacctgtacgccccctcgtctctcgatccctcgcttgctccggaagggtgccagacgctttacgtgctcgttcccgttcctcccctctcggatcgatcgcccgcatggacaaaagccgatacggtgctctatcgcaaaaaggtgctcgatctcatggagcgcgaaaccgcgtacagcgacattcgcgatcatatcgcgttcgagaagatctatacgccagtcgattttgccgagcggttcaatgcttgccaaggcgcgacgttcgggctgcggccgacgctgctgcaaagcaactactggcgtccgcacaacaaggcaaccgattgcgagaacctgtatttctgtggaagcagcacccatccgggtgcgggagtgccgatcgtgctgatgagcgcgaagctggcttgcgaggagctgatgaaagatgaccgtgccgtatagacgattcaccgaacgcgccggcgatttcgcatggtgcgaggatgttatcaggcgaaactcgaagagcttctaccgcgcgttttccctcttgccgaaatgcaagcgagaaagcgtgttcgccctttacgcgttttgccgcgctgccgacgactgcgtggacgtcgaggcgagcgaagcgtcgctcgatgcgctcgaacgcgatctcgagcgctttctttcggggttgacgcgcgacgagccgatgtggcgggcgatggacgtcgtcttcgaatctttcgaccttgacgaacagccgtttttcgacatgatcgagggccagcgccgcgatctttctttcaggcagcctcagacgatcggcgaccttgaagagtacgggtactacgttgcgggctcggtcgggctgatgctgctgccgattctccattcgcgctctgcagtttcggacgggctgaagcaaagcgcgatcgacttgggcgtggccatgcagataaccaacatcttgcgcgatgtcggagaggatctcgatagcgggcgcgtgtacctgccgagggatgcgatgcgcgaagcggggtattcgcaagccgagcttgacaagcgcgttctcaatcagagtttcgtgtgtgcgtgggagctgcttgccgaacgctccgaagagctctaccttcccatgcagcgcgatgtcgcgctgctcgatgagaatagtcgaatggctacgatatcatcgttgtttttgtatcggggcatcatggatcaggttcgcgagagcggctaccggtgcctgacggcgcgcagcgtcgtttctccgaaaagggcccgtcagttggtgaccgaagcagaggcgttgctgcgcaaagccgcgcagcccgctcttgtcgagggaaggtgatcgacgtgcaaaactacataggcatggggctctcgctcgtctacgtcggccttgttctcgccgtatcgggcattctttcgcgcaaaggcgcttcatccgaggccacgcgaaaattcgtccacatcgcactcgggggctggtgggtgattgcggcactgtatttcgattcgccgttgtgggctgccgcgctgccggcggttttcatcgttgtcaacggatatgcgtaccgcaagcaggtgcttcggttcatgtcgcgcgaagagggcaacacgccgggtacggtgtattacgcggtgtctctgacagcgctcgcgctgttttcgttttggatcggcaacccctacgtgggcgcgctcggcgtgttcagcatggcgttcggcgacgggttcgcagccgtgatcgggaaacggtacggttcgcggaaggttccgttttcttcgggcaagacccttgtgggaagtgcggtgatgtttgcggtgagctttttctcgtgcgcggcggtgcttttgctcgcgggccggccgttcgccgtcctcgttgcggcgttgcttgcggctgcggccgccgtgttcgaggcggtctcgtcggacggactcgataacctgacggttcctttaggggtttcggcgctgtacgccgtgctgttccttccggcggctgcatacacgcctgtcctcgtcggcctgctcctaagcggcgccgtagcggtgctttcgattcggttcggcctgctgaccgttgcgggagggctcggtgcggcgatcgtgggagcgcttgccttctctatcggcggatggcccctgtggcttttgctcatgtggtttttcggcagctcgaacatcgcgtcgaggatcatggcgaagcggtcgaatgccgaacgcaggaaaaagcatgaaacgaggaggctcaggcaggtgttggcgaacagcgtgccgtttctggcctgcgccgtcgtatacgcgattaccggcgattcgaggttcctgatcgtttcggctgcggccctcgccgcaagcaccgccgatacatgggcgtcggaaatcggagttttcagcgcgaacccgccgatcaacatcctgaccggcaagcgcatgcagcgtggcctttccggcggcgtgagccctctcggtttggttgcaactgccatcggatcgactacatcggcctttcttgccatgcttctgttccacgcgtttggctattccgtgccgacggggcccgatgcgtttttcttcatcatcgcctgcggcgttttgggctcgcttgtcgacagcgtgctcggctcccttctgcaggcaaaataccgtgtatccgaaaagcccgatctggtggaggcgccgtctgcgggtggacggggcggctacgtcctcgtatcgggctacgcatgggtcaccaacgatgcggtgaacttcatgagcggggcgatcatcgtggctctcggtttgctgctggtcgtgtaggcggggctcgctgatctccccggggccgcgaacgcgatccgcggcccccgtctgcagcgtttttccgccgcgctgcccgacctatcttgcgatcctgcgggattttgattgacgggcttaggcgaccttcggtgcatcctcggcgcgcgccatggccttttcgtaatctttcgtccccacgaatatctcgttggtgtaggggttgcgcttgagtttcttcgagcggtagattacgtagccgatggcggccacgttggcgagcagcgatactatcgagatggcgaggttcacattcgggtcgttcaccgactgcacggcgaagacgctcgaatcgaggaacatcgggaagcattgggcgaacatgcaccagatggcaagcgtgaaggcgcggttttggatccagccgcccttgttccagaggaatgcggcgacggtgggcgcaagcaaaagcgcaaggccgcaatagaacgaatgggttggcaggcagttgtaggtgtagcagaagttccagatgtcataggagatgatgaacacccacgtcatgtcgggccagagcatgtcctgcttcttcttggaaacgtagatgccgaaccagccagtcatgacgaagatgttgataagccccgcaatgccgttgaacacgttgtgccagccgccgtacaacgtgactccctcgcttgaaacccaggtggttccgaatgcgcgcacggccgattcgaaatcgctcaccacggcgatgaggatgttgatggcaacgatgacgaacgggaagcatttgaaccaatgcgacttgccgatcgcgccccatctgtatttgagcgccatgaagccgatgcagccgatggttgccgcatagagcttcgcgtagtgaaaccagctgttcatgtacagatgggttgggttgtcgagcgcccattcggcgccggatgcggcaccgaccgtgattgcgatgaagtagatcgtgagccccgccggcagcacgatgaagcagaagacgccgcccgccctcgtgcggcgtgcgagttcgttgatgaggatcaggctgatgaacacgacggcccatccgatccattggtagatggcgttttcgccatagacttggaatagcattggtcatccctttcttttccttggtgtgagacgtgcggggccaagcatccttgcgggcgctcctttcgttttgccgggtggcttggctcatccggcttcttcggttgtcggtatgcctttacgttccttgcgtgtcgggtcttttcgattcgccttcaggatccttgggacctttggggccgtcggcgggcccgcatcccctgtccatgtgcagcgtttgggcgatgatgtccttcaaaacctcgtcgtcgacttcgggatgccttcgcacgaaccctacgacgccgacgatcagcacgtagaaggtttcgtaaacgtgatcgatcttgatctcgtgcagcgcctcgtagtcgcgcacggtcgtttcaacgatgtaggaggccatgcggtcggcaacgcggttgagaaattcgaggtagagtgccgaattctcccgtgatgcgagcgctcttctgaacgagtcgtgttcgaatacgcccaggcgcaaaagtttgactacgctttcgagcgcgtgttcgatgttcccctgttgcctttgcgcgttccagtggtggagcgcttcgaggtaatcgccgatgtaatcgtcgagcacagccgaagtaacggcgtctttgccggggaagtagtggtagaagagcgttctcgtgacgccgacgcggttcgtgatatcttgcaccgacgtgcgggagagcccctgctcttcatagagctgtcgcgctgcttccactatatccgcgcgccgcgttgcatgctgctcgctttcgccgctcatcggtacacctccgatcgatgtgctcggcatcgcctgatgagcgcaggatacgcttttggttgacggatcgtcaatagacacttttgacgatccgtcaacgaccgtgcgggcgaagcaggcgcaagcgcgatggctgcggttgcggcctcccgtatataatggagccgttgttcaaacgagaaagcgatatgctatggatctctacgccgcactgcaaaagcccaaacccttcgagcgcggagcgagcatatggaccgacgcccgaatatctccccaaatgctgcaggctcatctggatgggagcacggattcggcgagctatgcgcccgatcggatagataagacggtttcgtttctgcgagacaggctgtgtctggacgaggggagatcccttgtcgaccttggttgcggccctggcttgtatgccgagcggttcgcccggcaaggcgttgcggtgacgggaatcgacatttccgagagctcgatagcctatgcgaccacgcaggcgaagcaggcggggcagcttatcgaataccgtaaccagagctattgcgagccgttcggcgagagctgcttcgatgcggcgattctcgtatgggaggatctcggggtcttgtcgcccgatgagaggcaagcggttttatgcaacgttgccgcagcccttcggcctggtggaatgttcgccttcgacgtggcgtcggagcagaggctttccgagctcgattcaggcggttcgtgggaatcgttcgaaacggggtttttccgcacgcatccgcatgtggtcatcggcaagacatggttgtttcccgaaacgaactcgtattgcgaaaccagcgttgtcgtggacgatgagatagcggtctaccacaatcatctgacagtgtttaccgaacagcgcatcgcgcaggagctgcattcggcggggcttgtcgtcgattacgtcggcggcgatctgatgggaagccccttgaccggggagtcatcgcagctgggcgtcgtggccgtaaagaagcgagaggcgatgccgttttcggctgatcggtgatatttctgatggcgggcatgctcggcgcgggtataatcgctttcatggaatctcttacggttaacatacccgatgtcgcgcttgtcatcgaaggcgggggtatgcgggcgagctatacggcgggggccgtggtgacgctgctcgagcgcgagatgcgcttcggaaaggtgtacggaatttcggccggttcgagccatgccgtcaactacgtatcgtgcgacgctgccagaaccaaggcctcgttcgtcgatcttgtgaacgatcctcggttcggcggcgtgaaaagcatgctttgcggcaaggggtatttcaacgggccgtacctatacgagggaatcgccgaagagcatgccggcatggacgatgcgtttgcgttcgattgggacgcgtttcaggcgaaccccgccgatgtccacatcgaggggtttgattgggatacgggtgagaccgttgcatggacaaaggccgacatgccgaccatgcgcgatatgatgctgcgcgtgcgcgcaagttcgaccatgcccatcttcatgccgcctacgactatcgggggacggacgtatatggatggcggcatgggggatagctggggaatcctgctcgatgcggcgcggcgtgacggcttcgagcgtttcttcatcatccgctcgcaggagcgcgaataccgcaagaagcccatgagcccgacagtgcagcggttgttccgcatgttgttccgcaagcatccgctggtggccgagcggtcgatcgagcgttggcgccactataacgagatcctcgacgagatcgaacggctcgaacgcgagggctctgcgatggtgttctatcccgaatcgatgggcgtttccaacaaggagaccgactattcgaaattgcaggcttcctatgaacgcgggtacgcgcaggcccgacgcgaggccgatgcctgggaggcgtggctgcgcccgtagcggcgatccccgcttttcgcaaccgtcctcgacgtttttcgatctgcatggtcgtgctaccatggttttctgtcgaaaggatggtctatgggtgccgatgggcaaagcgctacctcgaaacttgaggtcatactgggtcgcgaaggcgtggagcgccttgggggctccactgtcatggtgttgggtctgggcggcgtgggatcgaactgcgttgaggctctggcgcgaggtggcgtgggacgcctcgttatcgtcgatcacgacatcgtgcaagaaagcaatataaacaggcaggcgatcgcctttcgcagtacggtcggacgcaagaaaaccgaagtcatgcaggccatgatagccgatatcaacccttgggcggaagtggctgctcacgatatgttcgtgctctccgacaaccttgcggagctgttcgatgcgtatcggggcgagctcgactacgtcgtcgatgcgatcgataccgtttcgaccaaactcgcccttgcccttcttgcccaggaaaggggattgcgcctcatcagcagcatgggggccgcaaacaagcttcacccggaatgcttcagaacggcagacctgtacgagacggttaattgcccgctttgccgaataatgcggaaggaggcacgcaagcggggcatcgaccgcctgcgcgttctgtactcgtgcgaagagccggttaaaacggaatcgggcgaggggagcgaacggcgagaccgatcgaacttgggaacggcgtcgttcgttcctcccatcatggggcagatgatagccggcgaggtcattcgggagctgtcgggcatcggcgggggcggcgaggcgaagcgcaatgcgatgaagctggccgattcgatcaagcgcgcgggcggcgaatgccgatgaccttgttcgacatgcattgccatcttgatttcttcgacaatgcgcgatcggcggctgcgaaggccgacgagcaagacctgaagtgtttttccgtgacggtgacgccacgggatttcggaagggccttcgaattgctcgggtcccatcctaatattcgcgtcggcctcggccttcatccgtggtgggtcgccgatggaagctgcgggtgggaggatgtcgcccttttcgagcagatggcttccagatcgtcgttcatcggggaggtcgggctcgatttcggaaagcgctgcaagggctcggaagccgttcagctggcggcgttcgaacgggtgcttgcaacgtgcggacacggcggaaaggtcgtatccgttcatgcggtgcgtgcggaagatgcgatgctcgacatgcttgagcggttcggcaccgcgcgggcgaacgcctgcatcatgcattggttttcgggatcgtcggatcagctgcaacgcgctatcggcctcggttgcttcttttcggtggggccgaagatggctgcgtcgaagcggggccgggagtacgtgaaggcgattcccgaagaccggttgctgctcgaaaccgacgcccctgccgggccgggcgcgccggcatcctcgttcgaccttgcggggctgttgtccgacacgcttgacgagatcgagcggttgcgcggccttgatgccgctgcccgcatcgagcagacgtccgagcggctgttctcgggtttctagcggtactcgctttcgtcggccgattgccaaccgagcaatgcgtctccgacgaggcggaattcgaacggcaagggcttggcgagcgcgccgtcgtcgatattggtcggtatggcctccagatcgtgctgcatgtcgaagaacgaaacgtcctcgaacgcctcggcatcggccgccgcttcttcggcgtcggcctcgaggatgctgatgacggtgtcgagatagccatcgaggcgggcgctgctttcccttatggcatcaaggtcgcttttcttgaacaccgagagctcggcgcaataccagccgatggcctcggcgtcgtcttcgcccataaggtcgctgagcacgatgccgtgcttttcgaggtcctcgatcgtatagcattccgaaagaacctcgggtccaacgagcatctcttcgccgccgtcttcatcctcgatgcaatcgctcatgacgtagacggccagcaggatgagcatgtcctctcggtaattgagggagattccgaaatgatagttcgggtcatcgtgatacgagccccagaagatatcgggctgattctcgagcagggtctggacggtggcggccatggcgttcctttccgaagatgcacgtacgcatcaaagcgcatgcaaactatagcacgtaccggtgcgtttatcggggagcgtcacggtttatgccgatcggctgccgatggagtcgtcgcggttttcgaaaaggccccgaaacccccttgcgccgctcgcagcttcgtgccacctcgatgcggacttcttgcggatgatttcaggaggcgatgcgcatgttgtgtggctgggaggtaacggttggatggagaatggaaagcccgcttcgacgtgcggtatgttcagtggtgaagacgtgttcaacatactgaaggaaacgaaaggaggcccgccgtggcaagcgaagcgcaggaccggaaagccaagaaggggggtctgttcgacgacctttcggcaacccaggttatcgccggcgctcttgcggcggtaacctccatgctgctcgcttcccagatcggcatcgccggttcggtgataggcgttgcggttggttccatcgtgtctgcggttgcatcccagctgtataagaaattcctcgccgcctcggcagagaagctgcgtgatctgaaccccgtcgatgctccgtcggccccgaagggggacggaagcgaagacgccttgccggctgcgacgacggccgaggtggcatcggtgcggactgcggtgcttgcggcagagtccttagaggggcctgccgaaagcgccagaggcgaacgtgcgcgcgaaagcgaatctcccgtgcttgcagaaggggttgccgccgacaagacggcggtgctgagcccgataactcgcaggcaatctcacacgccgagcctggacgatactgccttgcagggcgatgcgaccgtcattcgcgcgaagacgctgcgcaagcacaagaagaggctccagcgaagcgttgctgccgtagcggttgtttctgcgcttgtcgcggtggtggtttcggcgttcttggtcaatgctctgacgggtggacagggcatcggagcgaaggtctcgccgttgccttcggtctatacgcagagcggaccggcggacgatgcagctgcaccttcgtcggactcatcggcttccgataccggttctgacaaaggcaaaggcgatgccgcatcacccgatgccgggaaggattcgggatcggatcagtcgggttcgggatcttcggggtcagccgatgatggaaaaaccgatggttcatcgggttcgtcgggttcgtcgggttcatcgggcggaagcgaccagggatcggacggcgagggaagcggcgggaatgccggaagcggcgacggccaggggtcgtcgggatccggccaggggtccggttccgagtcgggctcgggttccggatcgaatccgagcagcgaccaaggatcgggatcgaattcgggatcgaattcgggatcgggttccggccagggatcggcaagcaaggcggcaggcgagacggctgccggtcaatcggctgggaatcgagtggccgccggttaagggcgaccagattcgaaaggatgatgccggcggaaatcgagagcgggcgatttgcgctttgcacgccgccggccgacgacgatggtgatgattaccgaacgatcaccgaagcggcttttctcggagccgtgcggcggtatcggacggcggggtatccggcaagcatgcagcaggcgatttccctgccctctatgccgagccagctttcgagcggttcgtttcccgagatgatgcgcttgagatatccgctgtgcaggactcccgcaccatgggagacggcggcgagctccatgttcgctgcggcgagccccccgtcccacggatttttggttacgacgagaacgaacgctggagcattgaggaaaagctggtcggaaccgttttcccgatggtttcgatacgtctgctcgaatacgcggacataaggggagcgctcctgtttcagctgttcaatcacctgagggagctcatcccagagacgttccttgaactcggcgagctcgttttgcacgatgatgattttcgtgcgctgcctgtttctggcggttggggtgtagcgcgcggcctgaaccatgtcctcgatgacggcgcaatcgagttgctcttcgcggtatgagcggatgcttcggcgggatttgacggcgcgaagcagctgctcgggttcgatggcgggcgtgcgatcgatgtcgtcgatgtcgtctgcaccgtattcgggtatgcttgccgcttccgtcgggcatacggcaacgcaatgaccgcatttgatgcaggggccgccaacgacggcgatccctgcatcgagtcgcagtacccccggaaagcaatcggctacgcattcgccgcaccctatgcagcgatcggcgtcgatgtggacggctgttcccataggtggtttcctcgcgatccttggcttcgtctagagcagatgctcgcgcaggtagtcgccgctatgggaggataggtaggcgggtgcgatgtcgaacaccgtacgggcgcccgattgaccttcgaccgaaaggcgatgcgcggcccgcgcgaacgctacgagcacgtttccggtgaatccggggttcgagccgagcttgagcgagtattcgatcaatgcggggttcccgtcgcccgtttcgccgctgcgaagcacgaagccgccatgggggatgccggcgtgatcgcggtcgagctcttcctgggaaacgaagtgcacggttgtatcgtaatcggcgaaatagttcggcatagtgacgatctgctcttcgacggctgcggcgtcggcgccctcttcgagcacgacccagcattcgcgcgtgtgcttttggcgcgtggtgagctctggattagcgcccgagcgaaccgcttcgagggcggcttcgacggggatggtgtactgcttcgcatcggcgacgccgtcgatgcgccgaatcgcatcggagtgtccttggctgactccgcggccccagaacgtgtaatcggttccttggggcagaacgcaggttccgtacagccggttgagcgagaacatgcccggatcccatccgcaggagatgatggcgatggttccgccgattgtggcaaccttgtctactgcggcgaaatgctcggggatgttcgcatgggtgtcgaagctgtcgacgacggtgtacttcgcggcgtagcgcggggtttgctcgggcaggtcggttgcgcttcctccgcataagacgagcacgtcgatatcgtcggcgccctcatcgagttcgcttgcgggacgaacgggcacgccttcggtttgaaccttgacgcttgcggggtcgcgacgggtgaacacgccgacgagttccatatctgcttgttgggagatggcgagctcgacgccgcgtccgaggtttccgtagccgagaattccaatgcgtatgcgttccatggtgctccttgcaggtagtcgtgtacggttttctgtgtatggaaccatagtaacgcgaaacggcggcatcaagggaagtgctacccaaaggttaacgtagaagaaacgaaattcgggtatggggtttgcgggcgaattattacggatggcgggcgggcgaaggcctcggtcggcaccgaggccttcgcgttctactcgcacgcttcgggctcgaggcggtagccgataccccagacggtttggatgatgtgcggatcggaggggtcgtcttcgatcttctcgcggagcttcttgatgaatacggtgatgctcgacgtttcgccgacgaattctttgccccatgctgcttcgacgagctgctcttttgaaagtacgacgccggggttgcttgcgagcgagaagaatatcttgaactccttgggggtaagcgagagcttttcggtgcctttggtcgcgcggaactgggccatgtcgagggcgaaacgcccgatggcgagcacttcgtctttcggggcggcctgggaggccatgttcgcccttcgcaggtgggcttcgatgtgcatgagcagctcgcgcgggtcgaatggcttgaccatgtagtcgtcgcctccggcctgaaagccgatgcccttgtcgacgatgtcacctttggcggaaaggaagatgatgggtgccgtgatgccgcgctgcctcatctcgcggcaggcggcgaatccgtccatcttgggcatcatgacgtccatgatgatgagatcgggcttctccttttcggcgacggcgagcgcgtcgaagccgttatcagagtaagcgaattcgtatcccgcgtcgacgatcatgtttgacacgagccgctcgatgctggcttcatcgtcaacgagcaatatcttcatcgtactcctccgtatcgacagggacataggggatcctcacggtgaacgtgcttccttctttgcgggccgacgaaaccgagacggtgccgtcgtgcagctcggtgagctctttgaccacggcaaggccgagccccgtgccgcggtagcgacggttgggcgactgtcccgcttgctggtagcgctcgaagatgtcctcctggtcctcttcggcgatgcccatgccatcgtcggcgaccgagatgacgatgaagccgggatcggactcgtctgcgcccggtgtcttgccagtctcctggaagacggcgcgcacgtcgatccttccgcctgcatgcgtgtacttgatggcgttgtcgacgaggttttcgagtatgcgacgcagcttttcccagtcggccatcgaaagcggtatgtccgaatccgcccgtgccgtgagcgcgatgtctttgttctttgcaacgggttcgagcgagtttttgatgaagccgatcaggtcgacgaagtcgacgggttcggtgatgagctcgtttttgtgcgcctcggccttcgatatggtgaggatgttgttcaccatgttcagcagaagcgtcgcgttcgcctctatctcctcgacggcattgcgggttttttcgtcgagggaatcgacgctgttcaggatgcgggcgaatgcgagtatcgaggtgagcggcgtgcgcagctcgtggctcatgatggcaaagaactcgtttttgtaggcggtttcctcgctgagcttgtcaagcgtcttcttgagttcggccttctggtagatgagcaggtcatttaaggccgatagctcgtcggtttgattcttgacctcggtttccatgctggtgtagagcctctcaaggcgccgggccatcttgtcgaagtcgtttgcgaactccatgatctcatcagggcgcttttcgctttgcaggtcgagctcgtagtcgaatgcgccttcgccgattcgcttggccgcgttgccgagcgcttcgatggggcgcagcacgagcttgctgacggcgacgtatatgccgacgcaggcgatggcgagcacgagcagcaccatgaagacctgttgcacgacgcttgtctgcatgcccgatgcgtagatgtccatgggttcgatgatggacatggcaccgccgatgtcgccaacctgcataccctctttttcatagccgtattgatcgatttcgccgacgggctcgccatggcattcgaggcaggtttcagtcacgtagagcggctcggtgtatcggaatacctggtggccgttctcgtcggtgtccacgccgtagtacgcttcgagcgcggggtcggcctcgaaggcgtcgaacgccttcttttcgaaatcgtcaggtgcgcttgcggcctggcgcggcgtctggttggtgaatcgtatctcgtaatctgtttgcgtggtgaacaacgtgcttacggattttgccgcgacgacgcagacgaggtgcttcgtacggaacgtgccgtcttcgttgcggttgatgacatcttggttgatgtcgatgaagtcccagaccgcgcgcatctcgtcggcgaggacttcggctttttcaagcgcttcgttctgcgattgctgctgctgcaggttgacgttccatagagcgtctacgatcatgagagcaacgacgagtgcgccgatcagaacggcgaatttaaagcgaatgccgtaccggaacggtttggcgttctttgcgaacatctcgtctcgtttcccccgatgcactgcgatggctttcgtccgatcgcgcgcatgtccgtgttttcggcgcccctcgccgcttcgataattatctgtgaaaatgattgcgaggggaatggcttgcgtgcctggtaattctttttaatactttgcaggaatttcttaagagaaagttcaatcagaaaccattgaatcgcttttcctaagtgcgcagaatgggggcgaaaggtgcgctgggggcgaagcggcgcacaggaacaagacgaaacaggaagggagcattatgaagcaatctgctgaccatggaatgccgtcgctgtcccgcaggacgtttgtcgctgcggccgccgcaacgggtgcggctgccgtgggtcttgccggatgcagcccgtctgccgagaaagagcccgagaaggaagaggcggcggttgtcgatccgtatgccaacgcacaggttttttacacgtcgtgcccgcccgagtgccagcatcacaacctcaaggcatatgtggttgacggcaagatcgtcaaggttgagtcgtccgaactgaacgactgcgcagcctgcgcccgcggaatcgcccgcagctacatggccaccgatccgaaccgcttgaccgtgccgcttctgcttgacggcgagaaggggtcgggcgatttcaaggagatcacctgggatgaggcgttcgatctcatcgaggagaaattcaaggcggccatcgactccgatggggtgcagtcgatttgctacatcaccggttcgggaaacttcggctcgatgcacggacccatcgccaacgcgtttttcgcgcacctcgggggagcgagcacgacagtggggtcgctgtgctgcgcgggcacgacggcggctcagatcccgatctacgggcagcgcttcctcgacacgcgcaatcagatcgagaacagcagttacgtgatcgtgtggggcaacaaccccgcgatctcgaagcagggctatttccagcgcttcgaaaaagttatcgagaacggtggcaaggtcgtcgtaatcgacccgatcttcacggagtcggcttcgaaggcatccgaatgggtttccccgtggcccggaaccgatgcggccatggcgcttgccatgatcaaggttgttatcgacgaggagttgtacgataaggaatacgcgctcgcccatacatgcgctccgtgccttgtcgacaaggcgacgggcgagccggtgctcgaggacgaggccgatctcgcgtcgttcgtcgtttacgatgccaagagcggcgagatcgtccgtcatgataaaaatggcatcgaggcggcgctcacgctcgacgggacgtcggccgctgacgcgtacaacaccgagttcgagctgatatacgccgaggcggcgaagtgggatgccgccgccgccgaggccgagtgcggggttccttctgccgacatcgagcgtttggcccgcgagtacgccgaggcagacaaggctatgatcatccagaacatgggtgggttcatgcgtaccgaaaacggtacctacgcggttgctacgcagctgtatttggcagcgctctgtgggcatgttggccatgagggcgacggcgtcagcgacgcagccggcgtcaacgaggtcaagacgggcgctcctatcgaggttcccaagctcgagaccacggtcccctcggtcccgcgcttcaaattcggcgaggcgatcctcaacgaagacccgctcaaggtgaatgtgctgtggtcgatgacgggcaatccgatgacccagtggcccaacaccaacatggttcgccagggtcttgagaagattccgttcgtcgtgacggtcgaccagtatctcacctcaacagctctgtattcggatctggtccttcccgttgccgcccagttcgagcacgaagacgtgctggccaaccaccgcagccactggatccagctttgcgaaaaggccatcgacggtcctggcgaagtgaagagcgatttcgatattttcgccgagcttgcgaaacgcttcggtttcggcgacgcgttcagcaagccgatgagcgagatgatcgccagcgtgattgagcctgcgggtcttacctacgacgagcttatcgagaagaaggccgtcgatgtagtcggtgccgactacatcccctacaaggacggcgtgttcctcacgaagtcccagaaggccgagttctgggtcgccgcttggaaaaaagaagggttcaacccgattgcaacgtatgcccgctccgaagaggatgcgcgcaacggcgacgagctcgcaaccaagtacccgctgttcagcgtgcagcgcaagacgtatcgcggcgtgcattcgaccttcaataacctcgaatggatggacgaggtatgcgacaagcagccagtcgtcctcctgaacgaggccgacgccgaggcgcgcgccatcgccgacggcgatgcggttgtggtgttcaacgatcgcggcgagcaccatggcatcgcagaggtggggacccggatcaaacaaggcgtcatcggtttgcagaacggctggtgggagcagcagggaggctcgagcagctatgtcaccaacgacaagtggaagacgctcggcggaacccattgctgcaaccagacgctcgtcgaagtgaagaaggaggcgtaaaccatggcgctcggattctggatgaacaacaagaactgctacgggtgcaaaacgtgctccatcgcctgcaagagcgaaaagcagctgaacaacggagttttgctccgtcatgtaaccgaggtcaagcaggaggatccgctggctgtgtcgttcctctctatgtcgtgcaaccactgcgaagacccggcttgcctgaagaactgccccgtgcaggcctacaccaagctcgaaaacggtatcgtgcagcaggatcacgacctgtgcatcggctgtcagacctgcgtggaggcatgcccgtacggcgcgccgtgctacgacgaggtggagagcaagacgtacaaatgcgatatgtgcgtcgatcgccaagcgcagggcctgcttcctgcatgcgtggcggcttgcccgggtatgaaccttgctgccgatgagatggatagcctgcaaagcgcgcatgaagcagacatcgtgtccgacgatgcgacgggaactcaaccgaatttcgtgatcaccgtcgatcctctgttgaaagaggagccagacgatgttgcggtcgaggaagccgaatcgagaggcatgaaaaaagcgtagcgattcgagattgcgacgatgcgaaaacgggtgcgacagcatggtcgcacccgtttttttgtttgccatcgacgaaattggcggttaccgcgtgctgcatccagcgcagtggctttggcggttcgcagcttcgtctagctggcggcgaaaccgcgagcgcgcgaggggggagcctatcaatcctcgggaggaatgataggccattcgttgccggtgaggtgccaggccgagaagtcgagcgcgtcgccatcgacctctatctccttgatgcccgtatcgtgtttgccgttcgacgtggtcatgtagtaaaggcgctttcggttgggatcgtctatctcgaacacggtgtcgccgtacttttcgctgtcgccgcccatggcttcgatgacggtggggtggaaatccatatggcttaccggggcatccgatatctcgagcggctttctctgcccggaatcgtttgccggtttgacgagcatgatcgggcttgtcgtatctcctatcatgtcgggtgtgagataccagtatccgtggtctgcggtgacgatgatcgtcgaagagtcgtatatgccgagctctttcatctggtcgatgtattcggcgacaatgttgatggagccgatcgcctgctgggtgaacgtcgcattgccttcgccgatatcgattccgttctcgtccatgatgtaggggtagtgggcgccggtgaggtggatgaaccgaaacgcgcccgccgtttcgtcgtcgacgaggctgagctttctttctttgagtttctcgtagtaggcgggatcgttcatctgataaagggtgttcgcatcgtcggtgccctcgacggtcgataccatcttgttgttcatctcgtcggtgtagaaccagaactgcggcttgaggagccagggcatgtcgcggtacagagcgcacttcgcaaggatttcgatcgttcccgagacgttgacatgtttggtggtcgtggggtgcaggttgatggttttcgaggccatgtcgcgttctgaggggatgatgaaatcggcgccgatggaatcgctgtatatgccgatcgaatagccggtgtcgtgtatgtcgtcgatgaagcggccgttgccgtaccgatcggcatagtagtcgtcgtaggtttgcccgacttggggcgtaacgtcggtgagcaggtacggaactgcgtagcgtgtggggatcatcgagcccgtggagttttcgaagaacgtgaagtcctcgaacggacgggtgatttccggctctagctcgatgacgtttttcaggtctatggtgtcgtaggtgtcgagcacgaatacaacgacgttgtttttcggggaaagctcgaacaagccgtcttcggtgcattcgatcgggtcgagtttctctccgcggagggccgccgggtcgacgaggaggcttgcgacgccaaccgtctgcaccgcgatgagggcgatggctgctgcggcgccgaggaagcggacttgacggctgaagcgacggcttaagataatcagccccgcgatgatcgctatccaaacgagcgccgtcgaaaaggttacggcggtgtaatcgtgccaggggatggaggctccgtcggcggtgggaagaccctggttcataagcatggcttgcaggtagcatccgatggcgacggccgttacggagacgagcgcgacggtgaaggcgcggccgcgcaggatcgacatgagcagcgcgcatgcagcggcgagcgcgcctgcgaaaccgaccatgtaccatccgacatcctcgatgcccatgatgaggctggccgagttcgaggcgacgatttcgaagggggcaacgacgaacagcgtgtagaagaggaagatcgaagcgagcagcgcatacccgagacgcgcacgccagcggaggtgttcgcgcgaacctcgatttctttcggctgcagcctgtctgccgttgccggaatctacggtgggcgccgtatgctcttcgtatccgttttccgaaacgcgctggccgtgtattacccggtgaacgtcgggttcgacttccttatgcgcgttctcgtcgattttgagcattgcgaatatcttgcggcgcgtttttcgaaacacgacgccgagtacggcggaaagggcaactgcaacgcctgcaagcgcttggatcgtataggtcatgaccgaggggtcgacgtacgcataggccggttgggtcatgaacggaagtgcgaacagcgttgcgattgccgcctcgggcatatgggaggctatcgttcgggcggcgtttttggcggttgcgcgccggttcgcctcgcctgccgtcctgttgtcttcaaagcgctttgccgcagcgcccccctcggcgtcggccgtgtggccttcgggagattcgctgcagcggccctttgctttctcctgcttgtcgattatgcgggcaagcaggaattctccggcaacttctgcgctgtgcccgatgttgaacacggtacgccgggttgtctcggcgatccgatcgtgccatgcggactggttggcaagcatctcggcgatggcatcgggaagcttttcgagctcgtcgagtgaaagcgagatgccgatttcgttgcgcagcgagatgtcggtcggcactatgtcgatgtctttgtaatcggggtttcctatcttcatgggcgtatcgatgaagatgctcggcttgttggtggagaacgagaactcgtgggcaaccgtcgaccagtccgtgatgaggatgtctgcggtgaacaccgatttgttcgaggcgaaatctccttcgaactgaagctcctcgtcggagacgtcggcccagcgggcgagaatcgactcccagcgaggccgatagcgcttcgtgtactcggggtgggggcgcacgatgatgcgataccctttgccgagcagcgatccgatgatctcatcgatgcacgaatcgggaatgcacccctcttgccacgagggggcgatgatcacggtggggcgaccatgcgcttcgtcgggccgctcttcgacgagctgccggtaggattcgatcgtgcgatcgagaagatcgtatccgtagggcacgagctccttggcgggcgtcccgtacacttcctcggcgcgtcgaagttcgtcgatctgatgctgaccggagcacaggatggtgtcgtagccgtcgtatgcgcccttgttgggcgtcatgtgggtgctcgtcatgtgatggaacaggaagacgtattccgtttcgtcgcatacgtacgagcgcttgatgtaataggtgtcgagatcttcgagggtggttacgaccacgctcgcatccatcttcatcatcagcgtgatgatgcgcttgggcccgatgtaataggggcgaatgcgcggctgcttttcggcgatgccgaaaatttggtcgttgggatcgtttgtaacgtaatgtatggagcaatccgagttttcgagaagccactcgatgacgccctggaagtacttgtagaatccgctgctttccgaatagaacacgatatgcttgttgaccacgttgaagaagcgcttgtaatccgccttctcccgcttggcgagcggatttctctggtaccatttccgatcgctcttatcgagcgcttcaagctcttcgagctccttcttgcttgcttcgagatcttcgtagtcgatgtgctttctgggcgcgatgatcacgttgcagagggcctggatggctatcgacatgaggttcgagcatacccagtaaaagcccatgcccgttgcaacgaatatgccgaggacgaacgacaggccgatcgacagaccgttcgtggtgtttttctccatgcgcgactgctctcgctgcagggggttgatgcggttttgcgcaaaacccatgacgattgccgaaagacccgctgcgaacggcatgaaccaggcgatgcctccatccgttgcgggaaccatgcccagaagctcggttcccggagccccgtaatcggtgattccgtgaatgacgtccaccaagccgaacaggatgagtatctgcacggcgagcggcacgaggctcagcaggggatgataatggcgttctttgaacatctcgtgctgcttgtcgccgatggtttctctgtctccgaagtactttactttgatgcggttcagcgcgggcataagctgaaccatgacgatgctgttcttctggcaccagagcgacatgggaatcaggattatcttgacgatgacggtgaagagaagtatggcgatccaccagttgccggtcagccgatagcatggctccatgatgaagttgagcgcttgcgcaagccattccattgtgagaaaaccctcccctagatgagcgagcggcgcatctcgcttcgcgagcgcgaccgctgccgaaaagcagtcgaagaacaatgataaacccaaccgctccaatcgagaaggttaaatatggaagcggagtgatcagggaatcgagtccgtcggggttttcggcgaacagggtccggttgcgccgatgcggctctttgcgcgcttgcgggcggcaacgggaagttgccctcccgtcaatgcctatttgacgggagggacccttgcggcgtgatacgctcgaaaagcaaaaacacgtgttgattttcagtgcagccctagggaaaaactcagtagagggatcaggcagccggaagcggttgccctagctggcttcggccagggggataggagaagagcatggaatcaccgttcaacacagcaaagagcaaagcggcgtcgggagcgttttcgcgcagaagcttcatcaaaggcggccttgtggcaagcgccgctgcattcggcggcgctgcgcttgcgggatgcgcggcgcctgccgcatcggaaccgaaaggatctgcgggcgatgcgggggtgccgaccgacgagatcaccgcacgcctcgcggagcgggtcaagggagccgatctccccgacgccgcccccatcatgccggccgacccccctgagacgtgggacgatgaggccgatgtcgtagtcgtcggcgtcggcggcggcggtcttgtggccgtggcttacctggctcaaaagggattgaaggtcatcggcatcgagaaggaaggcatagtcggcggcgcaagccggcacgcctgcacgttcgccaacgtgttcggcggctcgaaggaccaaaacgaactggagttttcggttccttcgttcccacccgacgttcatgcgttcatgcgtttgtacgaacaggacaattcttactcgattgacgagaagtatttgaagaacatgctcgagatgtctggtcccgcatgcgactggatcatggagcaggatggcgtcgatatggtctgcctcggtcccatctggcacgatcgggcggttcacgaaggaacccagaatgttgttttgggtatggacaatcccactaacgccatggagcaggttgcgctggatgcgggtgcagacattcgcctgtcgacgaaatgcgcaaagctcgtttccgatggcgagcgcgtgctcggcgttgttgccgaatcgggcggcaaggaaagctacatcaaggctgccaagggcgtgatcctctccgcgggcggcttcggcatgaaccgcgatctcatcaaggcgtatctgccgagcgcttatgagggcacggtgcagggcggccccatgccctcgcacaccggcgaggtattccgcatgggtctcgggctcggagccgatttttcggggtacgattcgtggagttgctgggagggcgccatcgacgaggagacggcgggcggcgacggccaattctggcactatttctggcacggtgagcgccagctgttccacaatccttggctcatcatcgacaaacgcggcaatcggcaaccgtacttcgctcagacccaggagctctttgcgaaccccggtggccagatgggcgatttgagcaattgcgccgcatggatgtcggcggtggggcacaaggtgtactccatctgcgattcgaacttcccaacgaacatcttcgagaacaacgtgcttttgccgacgcagtccgatcgcaatcgcatcccgctgaccgatccggatgtccttatcgacaacggtggccttgtctcggctgattggctttcggaggtcgaagatgccgtcgctcgcggcgccgtcaaaaaagccgatacgcttgaagaacttgcggagatgctgacgctcgaccccgaagttctgaagagcgccgtgaaggagtacaacgagctgtgcgagaagggcgtcgatgaggagatgtcgactccgtacgatccgacttggcttcatcccgtacaggatccgccgttttacggagccatcgtcggaggtcagatggcgaagaccatgtgcggattgcgaaccgatgaaaaccttcaggtcatgaaggaagacgggacccttattcccggcctgtacgccaatgcgaccacagcaggcggtctttcgggtgaggcgaactacgggtgcttctggaattccaccgtgttcggcggcgtgggcacgagctggattaccggctggattgccgcccaatgcctcatcgacaacgaaggctgacgtctcggggctttagagccgatagccgtttcaggttctttcaggacgggggtcgccttgcagcagggcggctcccgttttcgtttgcgcgctatcggcgaacgccgtttctgatgaaggtgacaagcctttggacgtacgacttctcgtttgcctcgctgtaggcgaggcaaagggggagatcgatcttatcttccggatggaaaggcatgaaccgcgattcagggtaggccgtttccatcgagggatcgaagggctgcaggtgaatgccgccttcgccgcaaaatcggttgatcgcatcgtcgttgaggggcacttcttggaacagcgggtcgaagccgcgctcgcggcagcgggagatgaagcagtggatgaagtggtcgaaatcgaaagggcttcgaatgggcgtcccgcgcaggttctctatgcgcaggggcgctttgtcgcagatgggattagttttgagcgtgatggcccgcgtctcgaccatggagacgggcacgagcttgatgcccttgcgctcgtattcgccttgaacgaatccgaggtctatcgcgccttcttcgagtgcgttgagtattgcggtgtcggagagcttgtaggttgaaagggtgcagccgggcgttctggtctggaattcgcgcagcagccgaacggcgtcaaggctttcgttgaagaaaagaaaatcaaggggaaacgatttgaacgcgaccgagatcaccgtgcggtcggttgcccctgttttgcgcgcatcgatgaacaggtctatctcatcgagttcgcgcagcatcgcatcggcgtgtcggaggatctcctttccctcttcggttgggctcatcttatcgtcgcgatcgaatatatcgaacccgagctcctgttcgagcgatatgatcgccttcgagatggcttgcttggatacatagagatcttccgacgcctttgcaacgctgccgcaccgggcaaccgatgcgatgtatttcagctgatgcagctccattcgacgttcctcccgtgttcttttgccgatgcggccgtgccctcgatgctgccctattcgcctggcgcctctttgccgccgtgcgctttcagcttgatgaagagctcttcgcgagtggccacgttggttttaaggtagattttcgaaatgtgcgtttttacggtgctctgcgaaatatgcagctcctgggagatgaggcggatcgtgtacccgtccatgagcagcgcgaatacctcggcttctcgggttgagaagcttgcctgcgcaatcacgtcgtcccaatcggcttcgacgcggccggcttgccgctgctcgccttgtgccgggagctcggcgatgccgacggcgaacaggagctcgagatcgcgcggagtgaacacggtgaacagcaggatgatggccacgaggtcgatggcgagcgtcaggtagtacatgtgctcggttcccgcgaacaggacgttgttgacgagcgcatgcccgaaaaatccgccaagacatacggggaaaccgcagatcaatccatatgtttgggcggtcgatgtgtggaggcgtcgtacaagcagggcgctgatggcgaatacgatggcgtcgagcatgtttctcagcgatccgctgatccacgagaatgcgggagaatggtaggagccaagcgtcgtggcgatgaagagaacgaggattaccgccatggcggcatagaaccctttggtgagcgcggtgagctcttgcttgggcggcgccaccacgatgagaacgaacaggaggctcaagagcagcgtgccgaaattgataagctgaaacgatgccagcgaagcatcgaggtcggatgcggcaagcccctcctgcttggtgagcacggcgatgaagaacaccacgaagcacaccatggagagcttgaggacgcttttcttcgaaatgcccagggcgctgaactcgtcggttgttcgcgagaagaagctttcggttccggttggcgatgcttcggcgcaatcgcttcgagtgccgatcggcgcggattcccccttccgcgtttcggcgctcgggcagtttatccggcagaggaaaagcgcgatgacgacaggggttgcggcaagggaggcgagggagagcgctggcggcaacgacgaggtgacgaagtaataggcgatgccgacgattttagacaagccgaccgatacgaacagatccttcgccttcaaattgatgtaggcgttggcgcacgacatcataaaccacgccgccccgatgcccgcgagccccgctccgatccacgtgaactcggcgggaatccatccggcgccgattgcggcgcttgcggcgatgctgcccgatagagagcatgcggccgcagcgaacgcccctgggcgcccgaaggaggcgtcggccttgcgatagaagagcacgccgagcagaattgcggcggtcatgaaaagcgagaaccagaacaggtaagcttcgagcccggccgagctgcccgaagattccggggggaagagcacgaacgaggacgtctggacgtcaagccatccccaaatgagccccagggagagaaatcccatggtgggccagcgcgtttccgcgcatgtgagtatcctgttcagcattgacaatctcccctggcacagctagctgccaccatcccgtatccatgcattataccgtctttgcgcgccgatcccccgagcaagcggcgtatcggcgcgctgtgcacgggggatcggtaggaacgtactttgcctacgggcgaccgtctgcgtgcggcctgcgctagtcggcgatgccgcaggctcgccaggcggcaacgcgtccggttagaaacgccctgcctacgctcatgcccggcgtggtcatcttctggtatacgcctccgaagaagttgcccgagcagttgcctgcggcatagagcccttcgatgggtttacggtcttcgccgagaacctgcatgtcggcattcacttcgaggccgcttagcgtggtgagcaccgaagcgtgacgcggtatcgcgtagaacggtgccttcgcgatcggtttcaccttgtaaccgagctttccgaagtcgggctcatagtcgtagttgccttccgcaagctcgttgtagcgctgcaccgttgctgcgaaggcgtcggcgggaacgcccatctgctttgcgaggtcttcgatggtgtcggctttgtacacccaaccgttttcgacgccgtcgggcacgattgtggtccaatcgccgtattgggtcatgccggtgcccatgttgggcaggtcctccatgtagttgtcatcgaatatctggaagtgcatctgctcgggctgccgcacgtcttgcgcccaaacctcgtcgtagcttacatcttcgttggagaagcggttcccctcggtgttgacgcgcagaaacgggatggtcgttccctgcagcgtatggaatctgaggctcgggtcgtagtggatgttggagcagtgcggcgaacgctggatctggccgccggcccacatgcccatgagtatgccgtctcccgtagtcacgtcggggcgcgtgtaggcggattcgaggccgtctgcctgaggcaggtattccgcgcgcatctcggggtttccctcgtagccgcctgcagcgagaatgacgcccttcttcgcgttgcacagaatgtagtcgcccgcctcggtctgggcgatgactccggtcacgcggccgctctcgtcttgtcggagctggacggcgggcgtgttgtaccgcacttcggtgttgcctcgcgcgaccgcgtcgttaacgagttcggtggcgagcgtcatcatggtgcccgtgccgatcatctcccctacgggaatgaacgtggttttgaacgatcggttccagtgctccgagggggctaccgggtcttcgatgatgaacgggccgtacttcgtctcgccgaagcgatcgacgatccagtcggctaggttgccgctgtagttgacccagtttccgaggacgtcccatttgccgaggttgcatccggtctcgcgattcatgtcgccgacgatctcccagccgttcacatcatagcccatttcctgctgcattttcgatccgatggccgtgaatacgaaaccgtgcgaatagacgctctcgatcttctgcaaaaggatgacgcttgcgccctcctcggaggccgttgccgtagcgacggcgcctgcgtttcccgcgccgacgactacgatgtcggcctcgagggtttcagcgatctggtcgtcgccgatcggctcgggcttcgctttgtaatccttggcgtttcccgattggctttccggtgcggtgctttccggcgagctctgggccggagtcgagcatcctgcgagccctgccagggcggcagcgcctcccagtgcgacgcttcctttgatgaagctcctgcgatcaagttccatgtctctctcccttcctcatggtttcatcccgtccgccgaaaacgatcgccgcggcggagcggctccatgttaggtgcggcggggacgcagcgcatcctgcaaagcgtctagaaacggggtttcgcgctcgactattcggactagtccggggttgacaggggtgggccggtgcgatgcggatgaggctttgcgttttggctcggagcgcgtcgatgggaaatacctgtactataatggggacagttccgctttgcgaaaacgctatgacagcaagggtttttgctgtgtcgcgggagttcgatgcgccgcacgcggtcgtggagccgcttcgccggcaaggaggaaacatggctgaggggcgccagaagctgaagcttctgcatttgatgaggatgctaaccgaggagaccgattcggaatgcgggcttacgatggctcagatcctcgagaggctcgaggaggtagggatttcggcagagcgcaagtcgatctaccgcgatatcgaggctttgcgcgatttcggattggatgtgaggacataccagcgcgcaccggttgaatatgctgtcgaggatagggatttcacccttcccgaactgctgctgttggtggatgcggttcagagttcccgattcctcacgcaaaggaaaagcgactcgcttgtaagggggataaaggggctcgcgtcggcgcggcagcggactctcctggataagcggctgcacgtcgacggacgcatcaagacgcagaacgaatcggtgttctacagcgtcgaccgcatacaggaggccatcgcgcgccgcaggaggatatcgtttctctatttcaaatacgacgtatccaaaaacaagcgcatgcagcatgggggcgatcgttatgtggaaactcccgtgcagcttgtttactccgatgggtactactatctggttgccttcaatgaaaagcacgatgggttcgccaactaccgtgttgatcgcatggatgacatcgtcgtgctcgatgaacctgcgcagcgcaacgagcgcattgccggcttcgacgcccaggagcttgaggggcgggcgttcggcatgtacagcggagagcccgtttctgcgacgtttctggttgacgaggaggccatgtgttcggtgatcgaccgttttgggagagacgtccattccgtgccggtcgctgaaggcatggcgcgcgtgagcgccgttgtgatgaagagccccgtattcttcggctggctcgcccagttcggcgatcgcgtgcgtatcgagaagccgaagcgcttagcttgcgagtaccgggattatctcgctcggatcgtgggggcgtacggggattgaccacgttgagggctttgcctggcgttgaacgggctgggaggcagccgttcctttatgcgccgcccatgggcattggcggctggcatatatgagaaagaaggccaaaaaagccctttgacgcaacggggcgtgctttctgcggggcgtcttccgggtgctttggctatgcggttttgcttgcagagtaattatggctggtgttgtaaaatcgagggcattcgggtaactgctgttacactttcacatagtggaacccacgagcgccgaggggcctgccgttttgatttgccgatcgaggcgaatcgctctgacccttcgtgcctggcgtgtgtgctgcgctgttgcgcggcagcatgaactgacggtcggtcggttgcggtttgctgcaagcggttgaagttgccataaaaaaaggacttgcatgttcgaaaaacaagggtattgcttgaaaagcttcgtaatggctcttctgagctcgttcgccatttgcagccattttaccgctgtgcaagaccctgatttttctcttcccgatcttttttacctgggcaacaggtcggatatgcttttggctgcagttgcgctctgcgttcttttcgtttggtacgggaagcaggttggcaggaccgaccgggttgacaaagcgggcatcgttttgtccttccttttctcggccgtactcgtcgttggcagagcttttaccgtcaacgatgttacctacggcgtatacgggacgttcgacactatgatcggctcatggcagcgatgcctgttcacggtcctggtttttgcgggactgtggatcgctctctactacggcgttcggtttttgttcgagaagctggatgcgttgaggggcagggcggatgcggaggaaagcctgcccgattgcgggaaggccgtacactcgaggatcacgcggctctcctttttcctgcaagaacatagcccctggagctacatggcgctgtttgcgcttagctggttgccgtacatcatcgtctttttccctggcaccatctacgttgacggtgcgtatcagctgcgccagttcttcggcgccgacccttataccgggcatcatccgctggcgaccacgctgttgctcggctcgcttgttcaggttggaaaggctttgggatccgattcgatcggcatattcctctacgtcgccttgcagaccctgttggtttcctacgcgtgcgctcgcatcgtcgaatgcatccgcaagctcgctcctggtcaaaggtggatcgccgtcgcgtgcgtcgtctttttcgctttcgttcccgtctgggggggggcggttgtaagcgtaaagaaggacgcgctgttctatgccgcgttcggaatgctggtcgtatcggtgttcgagcttgcaaggcgctgcgcttcgggaggtcgagcgcggaagagggattacgtccggctgtttctgctggctttggccgtctctctcatccgcaacgaaggatccctcgttgcatgcgccatcctgtgctgtctcggcttgtatctgatcatcttgaagcagtcccgaaggcagtcggtctttctcgcgggccttgcgatctgcgtcgttctttcgtacggcatcggctacaaaaccgtgctcatgggcgctctcgatgctgagaacggttcgatctccgaagccctcgccatcccccttcagcagaccgcccgctactggattgcggcgcccgaagacgtaaccgattcgatttccgagggagtgagccgcgttctcgatacaagcgggttggtcgaatcggtgtacaacccgcaaatatcggacaacatcaagttcggcttcttccataaggagtacggtgccggagatctgctggcctttgcgcgcgcctacgtcgagatgggcatggcccacccggggctgttcgccgaggcgttcgtggatcagaccctcggatggtggtaccccgagctttacggagaccccgaccatgccgtttccggcatgggcttgtggcagctcactccggcgcccgacgtgtacggcgaagtggtggattcctcgcttgcgtttcaggagaccggagccgtgagtgcgttcgtgtcccttatcgactgctttgcgtatgtgccggggatcggcatgctcgtctatcccgccgtatacctctggcttctcgtcttcctcgcagcttacctggtgcgggccggtgaaaagcgcaagctggtgatgattcttccttttgcgttgaatttcctcatctgcatcgcttctcccgcaaatgggctgactcgctacgcggtgccgatcatgatggtttgcggaattctgattgcctttactttgggggaggaaggcgagtccgctagcgccatgcataggtgagagagctcttcatctgttgggagactccgtggcgaagcgcgggcgatttggctcgcttgcgcggactggcgtatcatgcgatggatctgaacctgttggaggtaccgtatgcgcatactgcttgtcgaagacgatgcggccattgtggcggccctgtcggaactgcttgccagcgaaggatacgaagtcgaatcggcgtcgcgccaagacgctgcaatcgatttgctggcaacgtcgtcgtacgatcttgctcttctcgatgtttcgctcgaacaggggagcggctttgccgtgtgcgcagccgcccgcgaggttgcccccgccatgcccgtggtgtttctcacggcgtccgatgacgagtacagcaccgttgccggccttgacatgggcgcggtcgactacatcgcgaagccgtttcgcgcgagggagctccttgcgcgcgtcaacgccgcactccggcgcatccaaggccaaccgacatcgctgatgctcggcgatgttgaaatcgaccccgtatcggctacggtgcgcaagcggggcgaagaggtcgtgctctccgccctagaataccggctgcttcttctgttcgctcagaactcgggctcccttatttcgcgcgagcgcatgcgcagtgccttatgggacagcgcaggcgaatatgtgagcgacaacgccatcaacgtgtacgtcaagcgtctgcgtgagaaaatcgaggacgatccgtccgacccgaggctcgttgtgactgttcgcggcctcggttacaaggcgggttgctagtatgggcgcctttgtgaggaaccccgtgctcgcacggcaggcgatagcgcttctttgcgcccatcttgccgtttgcgcgggagcctatgctttggccggatggcaggctgctgcgtccgcggccgttgcgggtcttctttccgtcgggctgttcgccctgttctcgatcgtgcgccatcgcgagatagcgcgtctttccgcagaggtagacgaagtgctccatgcgggacggcgcatcgacttgtccgattgccgcgaaggggatgttgcgattcttcgcaacgaggtgtctaagatgacggcacgtcttgcccgcactgccgatcagctcgaacgggaaaaatcggctctcgccgacgctcttgccgatatctcgcatcagatccgcacgccccttaccgctgtcgagttgatgattccggtgatagagcggtcgcagagcgaagaggagcgttcccgttggcttcacgaactcgatcgcatggtcgacagggtttcgtggcttgtgacggccctgctgaagatggcgaagctcgatgcaggtgccgttcgtctgcagagacgtcccgtcgatgctccgaaggctgtggaggcggcggtcgatccgcttgccattgcgcttgacatgcgcggggtcgactgcgtcatcgaggccgatggcgttgaaacgttcgacggcgatgcggcgtggacgaccgaggccgtcggcaacatcgtcaagaactgcatggaacacacgcccgaaggcgggcggataacggtgaacctcagcatggatgccgtagcctgccgcatccgcatagccgataccggtccgggcatcgccgaggaggatttgcctcacgtgttcgagcgcttctatcgaggcggcgttcgctcggccggcgcggtaagcgaaaaagacggcgtggatgcgtttcgcgcgcaggggttcggcatcgggctttcgcttgcgcaatcgcttgtttcggcgcagggcggatcgttgcgggcgtcgaatctcgaagcgggaggggcgtgcttcgaaatcacgtttccgaagttaacggtgtaggggttccctgcgctgttttcgggcatgttgggcgaaattacaattctgtaatgcgagcgtcatttccgagcaaggagcgtctgcgacgatagtctcggacattcatcgacgaagaaggcggacgccatggacatcattaccgtacagcatctgactaaggtttacggatcgggacccgcgtcgacccgggcgctcgacgatgtatctttctctatcgccgagggcgaatacgtagccatcgtagggtcgtcgggatcgggcaaatcgacgcttctgcacctgatgggcggcgttgaccgccccacatcgggaacggttctgctgaacggagccgatgtgtacgcgcgctcggatgaagagctcgccgtgttcaggcgccgagaagtgggtctcgtatatcagttctacaatctcattcccgtgttgaacgtcgtggagaacatgacgcttcccgttgcgctcgacggccgcgaggtaaatcgggatcgtctctcgtcgctgctctcttccctcgggctcgagggaagagagggccatcttcccaaccagctttccggcggccaacagcaacgtgttgccattgggcgcgcactcatgaacgcgcccgccgtcgtgctggccgacgagccgacgggcaaccttgactcgaagaacagccgcgagatcatggctcttctgcgcgcttccaacaagcagatggggcagactctcgtggtcatcacgcatgacgaggacatcgctctgtccgccgatcgcatcatagccatcgaggatgggagaatcgcgcgcgatgagaggatcagacgatgagcgtgatgacctcgttcacgctgcggtccctcaggaagaaccgcgtgcgcaccgtggtctccgtcgtcggtatcgcgttgtcgtgcgcgctgcttgccgccgttttcacgagcgtggcgagcctgcaggcggggctgtacgagcggacgcttgagaccgagggctcttggcaggtgtacgctccgagcatgtcggcggcagccctcggaaaccttgagcggagcgataacgttgccgacatggcggtttcccgcgagttaggctcggcgtatctgaccgagcaggatagcctgacaatgggcaaaatcgcgacggtgcgaacgcttccgcgcaccgtcaaaggcactttctctcccgaaggttcgccgctgacgatgattcccgagatcagcgagggtcgtatgccggagaatgccgaggaaatcatgctgcccgatttctgcaagaatgcggttttgggcgagggggcttccgacgcaggcgtttcctcgagcggccccctggaggtcgggggcacgctttccctcgatctcggaacgcgcgtcgtagacgacgcgaacgggggcgggcgcctgacgctcaacagcgtaacccatagctatctgtcctctgcagaaggaacgtatccccatgatgaggaaatcgtcgatgcgagcattcgcacctacacggtcgtcggtttctacgagcgccagtcgtcttttctggggaatgatttcacggctgcatcgtcatcgacctccatcgttgccgttacaagcgcggacgcgggggaggaaggggatgtcacaggtgcgtatcttaccgtgcgggggctttcgaacgcgcaggccgttcaggatctcgtactcgacgccatcggcgacgagcatgtgtacccgacgtatcactacaatctgttccgctaccagggcatcgacgatggccgtcccataacgggaacgctctggatgatcgcctacgtgctcgctaccgtgatcatcgtggcatcggtttcgctgatctacaactcgtttgcaatttcggtcgccgatcgcacccgccagttcggcctgctgtcatcgattggcgcgtcgaagaagcaactgcgaagatcggtgttgttcgaagcgtttttcctcggtctgataggcattcctttgggcgtgcttgttggtttggcgggcgttgcgttggtgttttcgtttagccaggaggcgtttgccgcgcttttggggacgggtggtggagtgcccgtgcatatcgatccggtcgtgatcgccatcgtcgtcctgctttccatcgttgttctgcttgcgagcgcgtgggttcccgcgcggcgtgccggccgcgtgtcggcggtggacgccatacggcagactcaggacgtgaagctgagcaagcgcgctgcgcgcaaagctctcggggtgggaagacgcgctgcgcgagggggcaaggcggcggtgggcccgacgggccttgccggcaaactgttcggcgcccccggtttcatcgcacatcgaagcctttcacggtcgagcgcgcgcggccgcacggttgtggcgtcgcttgcggtgagcgttgcgttgatcgtggtgtccggaagcgttgcggcgtatctttcgcctatagcggaccgggctgaaatccaggatggcgcaggaagcggtgccgacatcaccgtttcgggttcggcgccgcagatggccgagatgagcgcgtttgcgtcggatctcgacgatttctgcgagcgtgccgagatgatagagggcgtgaagttcctgagctcgtacaggcaggggcaagccgatgcggttatccccgcagaaatgatttcaagcgacgggcgcatcgtcggcgatgatcttgacgcgcagaggggctcgccatggtcgcctgcaagcttttcggaagaaggggactatcttggagatgtgacgattttctacctcgatgacgcttcgtggcttgagctcgtgcgcgaactcggacttgacgaggggcgtttcaccgatgcctcgaatccgcgcgccatcgccctcaatcggtaccaagggatcctgcaggatgattcgtatgcggatatgaagccctttgccgatacgggaacggtcgatttctacgtcatcgaccatactgttcaggtggattccgaatcgtgggcattcgtcgggctgctgaaggattcggcggggacgttatcggcgggatacatcaatcagtacagcgaaggcgaacccgacatgatggagaagcccatcgaggatgtggcggcccgctctacgttggagatcggcgctcttgcagatgaggtgcccgcttcgatcaacacggctgcggcctcgatgcactttcccgccatcatgttgccggcaagcgttgcgggaagcgccgtcggagcgaaaagccccggcggcgaagccggtctgttcgatttctactggagcaacctttcgtttacggccgaagatcacagcgccgctgccgtcgcgctcgaggagctcgcaggagattccgatttgctggacttcagggtgtacgatgtcgcagaggcatcgcaacaaagccggcttatcgctcaagcggtgcagctcttcattttctgcttctcgatcatcatgctcctcattgccgtggcaaacgtgttcaacacgctgacgaacagcattattctgagaacgcgcgagttcgccatgctgaaatctgcgggcatgggagaccgtgcgttcgcccgcatgctcgcatacgaatgcgcaagctatgcggtgcgcggtcttgtgatcgggctgatcgccgctacggcgacaacgtttttcctctaccaggcggcgaggctgtcgttttcggggctggagttcggcctgccgtggccgtacgtgggcgcagcggttgccgtggtgctcgcggtacttgcggtgagcgtggctttcgcgctgcataaaagccacgcgtcgagcgttgtggacgctttgcgggcggatgccgtgtgattgtcgaggacgggaatgctcccgcccccgacaattgtaggctaagtcaagctgggtcagatatgatgacgttgcctgccttcaaccgaagacggcctcatctcgatgaagggacgcaattctggaacctcgatcaccaacagcctcgcaagtgctgcggataggctgttgctgactcggattgggacgctatttttcgttccgaaacgttcccttctggcttcttcgataatccattggatcgaagtcttgcgttgcagtagtgcttctcggttagcgagcttaaccatataccgccatgcttcagggttgctcctgatccagcggtgggctctttggatttgtggattgtcccaatgtaggtagatttctgatgcactctcagtagtggctgcatgcatggtccgtcttctttctcgtgaatgtaagacaacagttcgttttgggctggagtaaagagcgcaactggtgccataccgtgttcgtatggtacacttaacctgcttttggagctgcgctcctgggttcgtggttgcccctgttgccgcaagggcaaccacttctttttcggtgggtccattaagctcctttcgacacaatagatctcatgagatcgctgctgtgagatcatgctttcatcgatatctcgaaccttgcattagggaatgcaagggataccgcctctagagtagatgcaagtttttcgggcgggaaggaggggtcgacaacgatgttgacttcctgtcctttatccttccggagggtaggaacgagctgcttttcggttttccgcatgctgttgtgggagtcgattgtttttgtgctgcaattctcctggacgcgagctactggctgcggttttaaagtgtttttttgaactgcactagcaagcatatcgaagaacctcagagtttttttcgctccttcttctttgaagccaccaaaatcctgcagacgttccagcttgtaccgactgtcgatgtcgttgtcgaagagcattggtattatttctgaaggaaaaaaatcttcgatgatccctttgcatacagatggatagctccgatcgtcaatccattctcggcctctctccgtgagttgaccgaagctatcgattagatggaaatccttgagacataagatgctccgttgtgcagtattgtcggatcgtacgctctcgactttttgcaagaggctttcgggcgtcgcccgaaaagcagaatctttttggaacttgagcctaatttcatcccaggcagatttcgatatcataatgaccttcatgacgctcctttctgtcgctttgctacagtataggacaagcgtccttgatatacaaggacaaaaggacgactgtcctctttatagcgtttcgaaggaggagggaggtggagtgttatcgttcgttggctgtggagtacgaccggcaatccagaccttttggcggggtcatgggtatgatgggctcggccatacgctaccctgtaaactgttgatgaaaccgacaagcgaggatggcgctgatggccgacgtgattcctttttcctgcattcgtccgcgcgaggatagggcaagcgacgttgcgtcgcttccctacgacgtgttcagcttagacgaggccaaagacgagatcgcgcggcatccgcgctcgtttctgcgcatagacatggcggaagccacatttgccgattcggtcgagaagcacgacgagcgcatctatgcgcgggcgcgcacgttgcttgacgaggccatcgccgatggaacgtatgttgtcgacggcgaaccccactattatctgtaccgccttcaggcggtcgacggcaggtcgcagaccggcgtggttggctgctcgtcgatagacgactacctgaacgacgtcatcaagaagcacgagaaaacgcgtgctgacaaagaggtcgaccgcattcggcacgtcgatacgtgcggcgcgcaaaccggccccatcttccttgcgtttcgctcggatggagcgatcgagcgcgtgatcgagaaaacggcttcggccgaacctctctacgatttcgaggccgatgacggcgtgcgccatacggtgtggcgcgtggacgaccccgccgatgccgacgccatacgggcggccttcgaagcgacgcccgccctctacatcgccgacggacatcatcgcgccgcctccgctgtgaaggcggggctgctgcgccgcgagcgggctgctgcggcaagcaggggccgtggcgaaagctcggccgccaatggatccaatcgcaacgatgggggcaagcagggtttcgcggatgccgtgccctgcggcgattcgctcgaatccgaccattttctctcggttgttttcccgagcgatcagctgacgattctcgattacaaccgagcggtcgccgatttgaacggtctgtcgtctggggagttcctcgatcgcattcgcgagcgattcgaggtgggtgaggcggctccgatgccatgcaagcccgattgcaagggctcgttcggcatgtatcttgacggtgcttggtattccctcgagatcaaagacgcctatcgatcgagcgatcccgtggcgggtctcgatgttgcgcttttgcaggacaacctgctcggccccgtgctcggcatcgaagatcctcgcactgacaagcgcatcgatttcatcggcggtatccgcgggctcgaagagctgaagcggcgcgtcgacgggggtatggcggtggcgtttgccttgtatcctacgtcgatagaggagctttttgcggttgccgatgcgggattgctgatgccgccgaaatcgacgtggttcgaaccgaaacttcgaagcgggctgttcatccatcggatttagtcgcgtgtggaagcgcctcccgcaccgtgctctatcgttgctcgaaagacgcgcttcccgctgaacgggcgtttgttggaccttggacaatcttgctgtcggcgtttcccgaacggcatctctaggcgagaggcatctgctgatagaggccgctttcggtaaacccgagggcgcggtagtactcgcgcgttcccaccgagctgatgacgttgattttggcgtagcctttgttctttgcgatgtcgcaggcgattttgataagctgctttcccaatccgaggtgctgcgcgccgtcgcctgttctatggagaccggcgacctttccgtacacgtgaacctcgcggatcatcgcttcgcccggtccgacgggcaggtcgggggcgctggatacgtagtcgttgtgcggcatcgagagtcggaggaatcccgcgatctttccatcgggcgttacccactggaggaaccgctcgctcgaaacggtggtttcaaaagggattatgtcgagggagagttcgccgatatccgtatcggcggtgctgatctcgcgatagcggatttcttcgatcggcgtatttgttgcggcggctttcctttcgaccatttggcgcaggttgatctttttgtttcccgccacgatgtcgtgagaggagatgtctcggatcatgcgcgagatgcgaacgtagggcggcgtgatcgaagcgtcggtaacgagcacgtcgagcagctcgtcttcggtataggggcgccatctgccgttttcgaacagctcgcaaagccccgtgccgtgcacgagtgcgcagggatacagcttcacctcgtcgggaaggtaggcgctttcggtgacgaggcggcggtagtcgcgcttgtcggcctcgacgtttgatccgtagagattcgccatgaagtgcacatggatcttgaagccgaagatgcgcagcagctcgaaggccttgcggatcgcatcggtgccgatgccacggttgttcatgcgaaggatggtcggatcgaggctctgaatgcccatctgcaccttggtgcatccaagctgtcggatcagcctcaggttttcgcaggtgatggcatcgggtcgcgtttcgatgaccaggccgaccacccgatgccgcgcatcctcgttggcggtttgctgctctgccagctcggccaggtcggctgtttggatggcggatgcggttttccatccgtcgttctcttcgtagaggctcttcattgcgcggttgtaggtgagatcgcctgattcgactgcactttgtgcatctcgcacgaattctacaagatcctctcggcaattgctcaaccctgcatcctcgtagaacctctgcctctctttcgctttcccctctgccctctcggcctcgttgagcgctcggaacagttctttgacgaaccatatctgatagctttcagggtagtccgtccaggtgccgccgagcacgatcagctcgatcttgtcggtgacgtgccccatgtgcgtgagggtgcgcagacgcgatgtcacctgaaggtacggatcgaagtagttgcgctcggcccgctggcacgccggctcgtctgcgagatagcttttgggcatgcgcagatcgttggggcagtaaaggcagttgctcgagcacttccagggttttgtgataacggtgatggtcgctacgcccgaggccgtgcgtcgaggtttgacttgcagcgtttggatgagctttttctcgagggccgaatcgacgttccaactttcccatagcccaggatccgattccttggttttgagatagtagggcaaaagtttctttttcgcgtagtggggcattttgccagtgcggccttggttgtgtctgcggacaaggttttccacgaaacccttgtcgacgccgccacggcttctcaattcgtcgagtatttccagtaagatgtcatccatgctataaggcattctataataccgatgtgactttatcgcaatcgatccgatcggcgaggcctttgaataccgaaactgctgaaatgctctgcgctatcacgagcgacttctacgcgaagcactgcgattcgttttccgagacgcggcaggcgccgtggaatggctggaagcgctgcctcggtttggcggaaagcctagcgacggaagccggtcggggcagtggggcgcctcgcggctgcaagggggaggatgccgaggttgtcggagcgggcaggacatgcgcgatggacggcccaaagcttgctggggcagcggatggcgcaagggtttcgtccggaaacgccgagctacgtgtgttcgaccttgcgtgcggcaacatgaggttcgaatcgtatcttgcttcggctttgcctgggattagcttttcgttctacacggtggacaactgcaaaggccttcttcccgaaggcgtggcagacggagcggttgcgggcggccaaagcgctcgcgcgattgcggggcgtttgggctcccacgcgtccgtcgagcatcagaacctcgatgtggcgggctgcctggttggcggcgaggatctgggcgatcgattgcatgtgccgatatgcgatctttccgtctcgttcggattcatgcatcatattccgcttctcgaaaacaggaaaagggttttgtccgctctcatcgagcgaacgcgttcgggcggctttgtcgtagtgtcgttttggcagttcatgaacaacgagaccatggctgcaaaagcgcgggaggtgcacgcggttgccttggaggagcttggaatgcccgaacttgatgcgggggattttctgctgggttggaaaaacatgcccggcgcctaccgctattgccatagtttttcgagggccgagatcgacgggctgattgccggcgttgcggacaagatcgaggtggccgcgcgtttctcggcggatggccggaccgacgatctcaacgcctacgtggttttgagggttcgctagccgtgattggggctgcgttgcagggcatccggcggcagccgtagcgcgctggtctcgtttcggatatgcggttcaggttcgcgaattcgaacgttcggcaagaatcgcgggaggcgaaatcatgggagaccaagggtcttcgtcagttccctgcgcccgtttgctcggcgtgagttgacaaacgggctttcgactggaaaaatcgctgaaacggcaaaaggaaggaatcgcgatgtatgtagtctgcctcgatcttgaaggcgtgctcgttcccgagatatggatcgcgttcgccgaggcgagcggaattcccgagctcaaacgcacgacgcgcgacgagcccgattacggcaagctcatggaataccgccttgggattcttcgcgaacacggtctcggccttaaagagatccaggagaccatcgcgacgatcgacccgattcccggtgcgaaggaattcctcgacgagcttcgcgcttacacgcaggtgatcatcatcagcgatacgttcgagcagttcgcgaagcctctgatggagaaacttggctggccgacgatcttctgcaacacgctcgaggttgctcccgacggcgaaatcacgggattcgcgatgcgctgcccccaatcgaagctgacgacggttcgcgcgctgcagtcatgcggattcaccaccgttgcggcgggcgatagcttcaacgaccttgcaatgatcaaggcgagcaaagcgggattcctgttcaagagccctgactctatcaaggcagaaaaccccgatttgcctgcattcgaggaatacggcgagctcatggaggccatcaagcgcgctatggactgatcgcttgcggcgaaacccctgaaggaagatgcgaatgcggcaccgtttggtgccgctactcttttccggtccagcaatacgtgcataccatttcggggtcgatgccgattgcctcgagcatgccgtcgagcgattggaatcccagtgaatcgaagcccatctcctcgcagatggcggaaagcatgcacttgccgcgttcggtcgaactgtcggcgtattcgtcgaggtggttttgcccttcgtcgccttcgagctgctgcaccacacggcgggcgagaagctccatctccgatttgctgctcgaaaagctcaagtacttgcagctgaacatgaggggcgggcaagcggagcgcatgtggacctcggcggcgcctgcgccgtacaggaagtcgacggtttcgcgcagctgcgtgccgcgcacgatggaatcgtctacgaacagcagtttcttgccgttaatcaattcgggtacgggaacctgcttcatcttcgccacgcggtttcgcacctcttggttcgatggcatgaacgaacgcgcccaggtgggcgtgtacttgatgaaggggcgggcgaagggggtttggcactgcgtcgaatacccgatcgcgtgcggtatgcccgaatcgggtacgccggctacgtagtcgacatcgggaatgccgcctgccgccgcttcgtcgcgcgccatgatcgaaccgttgcgatagcgcatgacctcgacgttcatgccctcgtagttcgagttcgggtagccgtaataagtccacaggaacgcgcagatcttcatcttgtcgccggcaggggatatggtctcgtagcgatcggctgtcacgcgtacgatttcacccggtcccagctcgtactcatcatcgtaatcgagcttgtggtaggggaacgattcgaacgaaatgcagtgtccgtcgtcctttttgccgatgagcaccggcaggcgccccatcttatcgcgcgcggcgatgatctggccgtcgttggtgatgatgagcagcgtgagcgatccttcgatggcatcctgagcatgtttgatgcctgaaacgaagtcgtctttctgattgatgagggcggcaacgagttccgtggtgttcacggcccccgagctcattgccatgaactgccttcctccgttggcgaagttgttttccacgagctgctcggcgttgttgatggcgccgaccgtcgtgatgccgaaggtgccgagatgcgatcggacgagcagcggttgcggatcggtatcgctgatgcagccgatgccggtgcatccgtggaaccctgggaggtcgctttcgaaacgggtgcgaaacggcgtgttctcgatcgaatgtatctcgcgctggaatccgtccttcgcgtcgtgaaagatcatacctgcgcgtcgtgtgcccagatgcgagtggtagtccactccgaaaaacacgtccaacaccacatcgttgcgggatgccgctccgaagaatccgcccatcgtgtacctttcgccttgcctgaccgctttcgttacaacgaatataccagtataaagctctcggtggtttgcgggggcgaagtcgcgatgctgttctcggtatgcacagaaagcgcccatcagcggcagcggggcggcgcatttccgccgaccgtccacgcgtagtcgcttgatggagatttttccttatgctggcgcatcgcgaatggtgcggatatcgtttcaggacgacggttgagaagaaagcgcgaacatgaagaagatccttttgatcgctacgggtggaacaatcgcctcggttgaggacggatgcggcttgaagcctgcgtttacgggcgaagagctaacggagttcgtaccccagattggaaacttgtgcgagcttggcttcgtgcagctcatgaacatagacagcaccaacatgcgtccgtcggattggatgcgcatcggggatgcgatcgtgaaatcctacgacgattacgatgggttcgtcgtgctgcacggaaccgacaccatggcctacaccgcagcggccctttcctaccttatccagggaagtccaaagcccatcgtgctcaccgggtcgcagcaacccatggcaagccccttcaccgatgcgaagctcaatctgtaccagagcgtcctgttcgcctgcgacgatcggtcgtgcgacgtttcggtcgtgttcggaggcgctgttcttgcgggcactcgcgcgcgcaagcagcgcacaatgagcttcaacgcgtttgcgagcgtcaacttccccgaaattgcgcttatcaggaacaatcgcattatcagggcgggaacgtgcgtttcctgtccggacagggaatcgaagcctcgcgtgtacgatcgcttgaacgagcgtgtgttcgtgctcaagatcacgcccgagatgaagccgggcgttttccgactgctcaaactggattacgatgcgatcatcctcgaaacgttcggcatcgggggcattcccgactacggcgactatcggaaggctattttcgattgggtcgattcgggcaagacgctcgtcgtgaccacgcaggtgcccgaagaggggctggatcttggcgtgtacgaggtcggacgcgcctacgccgatcactgcggcatactgaagggcggcgatatgacgaccgaggcgcttgtggcgaagaccatgtgggtgctcgggcagaccgacgattccgccgaaatcaagaagttgttctaccatgtggtgaatcacgacaggacggtcgccgagtaaggccgaacgccggtcgatgcgctagaattgttacattgtctgtgcggttttccgagcagaagcctgttttcttaggcgggctttaggcgggaatccgctggtgtttgggaaacgggaggaactggtggcgagactatcggttgcgccgaaggcacgtgccgatgagcgcatcgctgactacctggataaacatgcccgccgcgtggcggcgacgcctccgggcacctgccctttggctgtgcagctatcgcttcttcgggtgagcggatctcagacgtgcggcaagtgcgtcccctgccgcgacggcattccccagctgacggctctgctcgagcgggtggttgcctgcgaggccgatgagagcgcactttccactctgaagacgcttgccgagatgatccgcgatgcgtcggattgcgccatcggatacgaggccgcttcttccgtgcttgcggggctcgaagagttcgatggcgaataccgaagccacgtgtttggtcggctgtgccaacagggggtcgggcaaaccgttccgtgcgagaccctgtgtcccgcgcatgtcgacgttcccgcctacatagccttgacgggagcgggcgattacgcccaggctgtgaacatgatacgcaaggacaacccgtttccgacggcgtgcgcgtacgtgtgcgagcatccgtgcgaagatcggtgccgcagaacgcttcttgatgctccgatcaacattcgcggcatcaagaagtacgcggtcgaacaggcgccggccgatacggtcgacgtgccgaagcgaaatgccgacaccggtcgcacggttgcggtcgtaggcggcggcccgagcggcttgacctgtgcgtactacctttccctcatgggacatcgcgtggttgcgttcgaggcgcgcaggcagcttggaggaatgctgcgctacggcattcccgcctaccggtttccgcgcgagcgcctcgacgaggatgtcaggggcatcttggccgtcggcggcatcgaagtgcgttgcggcgaagagatcggggcgaatgagatgcgcgatctcgtcgaggcgtacgacgcggtctacgttgccgtcggtgcgcagaccggcaagactttgcgggttgataacgccagggccgaaggcgtcgcgtcggcagtcgaactgctcggcgagatcggcgatggggcatatcccgatttcacgggcaagcgggttgcggttgtcggtggcggcaacgttgccatggactgcgcgcgcacggcggtgcgagctggagccgaagaggtgtcggtggtgtaccgcaggcgcaaagacgatatgacggcgcttcccgccgagatcgaaagcgccattgcggagggcgtcgagatggtggtgctcgaatcgccagtgggcatcgaggtcgatgggagcggatgctgctcggcgctcgttacgcagccgcagatgatcgggccggtgaaagacggaaggcccgcccccgtcgcggccgacaagccgcatgggcgcgtagaggccgatgcggtgctcatggccgtggggcagggcgttgcagccgagccgtttgaagaattcggcatgaagaccacgtggggctgtttcgatgccgacgagtttttacaggccgaaggacttgaaggtgttttcgtggggggcgattgccagaccgggccgtcgtcggcgatccgcgcgataggcgccggcaaggttgccgcgcgcaatatcgacgaatatctgggattccatcatacgctcgattgcggtatcgaagttcccgtacctcagtccaacgatcgcacgcccaggggccgtgtggaaatcgccgagcgtccggctcgcgttcgcaggctcgattttctcgaagtcgaaggttcgatgagccttgaggaggtcgagcaggaatgcggcagatgcctgcgctgcgatcattttggctgcgggacggttgaaggaggaaggcaacggtatgaataacgtgacgatagacgggataggcgtcgaagttttcgagggggctaccattctcgatgccgccgaagcggcgggcgttcgcattccgacgctctgctatctcaaggggcgcaacgcgatcggctcgtgtcgcgtatgcgttgtcgatgtgcgagacgaggatcggcctgttcccgcgtgtacgacgactgtgcgggacggcatggttgttgtaacgcagtcgagggaactcaccgggtatcgccgcatcgccctcgagctgatagttgccgatctcgaagccgaggcggcagacgatctgttcgcggcaagcaagggagacgaatccgagctcaaaaggctctgcgacgaatacgacgtttcgaagccggcgttttctccggttagaaaaagggaacccgtgctcgatggcaatccttttctcatctacgacccgaacctctgcatcgcctgccagcggtgcgtgggcacctgcaacaacgcggcgcgcaaccatacgctgcaaacgcgcaggcgcggcgtgcgtaccgtcatcgacgctccgttcgggagcgactggaagcagagcgcctgcgaatcgtgcggcaactgcgcccaggcgtgtcctacgggcgcactgaagaccaaacgccgtgcgagctactatgccgacgatacgaccaaggtgctcacgacgtgtcctcattgcggagtcggctgtcagctcaacctcgttgtcgaagacggcaggatcgtcgatgccgaaggcgctgcgggtccgtccaacaaatcgcttctgtgcgtgaagggaaggtcggcaagctacggtttcgtggattctcccgatcgcatccgcacgccgctggtgaaaaacgcgctcacaggcgaattcgaagccgccacatgggacgaggcgctcgatctggtggcccgtcgccttgcgggtttgcgcgatggatacgggggaggctcgcttgcggcgttcgcttgctcgcggtcgaccaacgaggatgtctatctgttccagaagatggcccgcacggcgtttcgaacgaacaacatcgataactgcgcacgtgtttgacacgcccccagcgttgccggtctggcaacaacgttagggtcgggggctatgacgaactccatcgacgacatcgcgcaggagtcggatgtcatcatgctcgttggctcgaaccccgaagaagcgcatccggtattcggcatgcagatccgcgccgcggtcgagcggggcgccaagctcatcgtggtcgatccgcgcgacatcgggttgacagcgcgtgccgacatccatctcaagctcaagcccggtacgaacgtggccttcgctaacggcgtggtgcatgtgctcatcgaggagggctttgcggacgaggcgttcgtcgaagagcgcaccgaaggtttcgagcagcttgccgagatggtaaaggaatatacgcccgagcgggtggctgcgatctgcaacatcgatccgcgcgacctcgttgcagcggcaaggatgtacggaaatgccgacaaggcgtcgatcgtgtactgcctcggcgtgaccgagcactcaagcggcaccgacggcgtgatgtctctttcgaacatcgcaatggtgtcgggcaaattcggccgtcccggttgcggcgtgaacccggtgcgcgggcagaacaacgtgcagggcgcatgcgatatgggcgcggcgccggctgactttcccggatatcagaagctcgcgaaccccgaagcgatggccaagttcgaacgggcgtggggtgtccggctcagtcatgagccagggcttatggccactgaatgcttcccggcgatactcgatggcaagataaagggcatgttcatcttcggcgaagatccggtgcgcaccgatcccgatacgaggcatgtcatccatgcgctcgaatcgctcgagtttctggtggttgacgagctgttcatgaccgagactgcgaagttcgccgacgtcgttttgcccgggcggagctatgcggaaaaggagggcacgttcaccaacaccgagcgccgcgttcagcgcgtgcgcaaggcggttgaaatcgacggcgatacgatgctcgataccgatatcttcaccgagatcatgaatcgcatggggtatgcccagccgcacatgagcgccgctgagatcatggacgaaatcgccgcgctcacgcccccttacggaggtgtgagccatgcgcgcctcgatggagacgaagttgccggttgcggattgcagtggccctgcccgagcgcggatcatcctggaacgccgatcctccatgtgggcgagttctcgcgcggcgccggcgcctattcgcttgcggggtaccgcgagccgaccgagccaaccgatgaagattatccgtttatcatgatgacgggccgcatcctgtatcattacaacgcctgtgcgatgacgggacgagccgaggggctcaacgaagtggctggcagctcgttcatcgagatgaacgagcgcgatgcggctgagctcggcatcgctgacggagatcgggtgaaggttgcctcgcggcgcggcgagatagagaccacggcgcacgtgtcggaaaaaacgtcgcccggcgaaacgtggatgccgtttcatttccaggatgggaacagcaaccggctcacgatcgctgcactcgacacgatatcgaagactcccgagtacaaggtgtgcgcggtgaggatagaaagggtttagctacatgaagatcaaccacgcgattctgcacgtactcgatttcgtatcgtgcgtgaatgtgatgtcgcaggaggaactcgaccttacaagcaagaacgcaaagcgatacgttgcggggcatgcgaagcacgcgctcggcaacctggacaacaagcgcggcgagtttgcgcccgatagcatgtttgccgaggagatcagaagctactttcgcggacaacgcgatttcgtggatctatccatccaggtggcggaattcgttgccggggagctcggacgcatggagaaggccgcctcgaccgacgtgctcgtggttgatttcgaagacgaaaccaaggcggctgtgggagacatgtccgacgaagagatcgacgcggcattcgaaggccggggcaagcgctatttcgcgatgctgatgctcgagagccgtcaggcgttcatgcacgaagtgggccgcggcgagagcggcgacgtgcgtaccgcgatagagcgccaccatgccatcctcccgaatccatcgcagaaggtgcagtcttatgcgctcgtcgaatcgggctcgctcaacgtggcgttcagcgacaaggcgcgcacgattgcgggcgaggagcgctggctcattcccgacggtctgctgcaatgctcgatggggccgtcgggcaaagaggtgttcaatgcggttgcgcgtatcgtcgaggaggtagccgaggaatacggcgcgaactcggcggtcgccgtctcgaaggcgaaggcctacgttgccgaaaacgcccgggactccgacgaggtgtaccccgaggaactgggtcgcgaggtgttcgaagacgatgcgctgcagaagcgcttcgaagaggcggtggccgaagaggccattcccgagcgcgttgtggttgaaaaggcggtggccgaccgcgtggcgaagaaccataagatcagaaccgataccggcatagagatcacgtttcccgccgagtacagtcagagcgccgagttcatcgagttcgtcagcgagccgaacggcctgatttcgatcgaactcaagaacatcggaaggatcgagaaccgatagcgcagccgccgctcggattttgctctgctgccgttttcctgcgggattcggccgccttcggaaaagcgagagcgcccgcgcatccgaccggaggcgcgggcgctctttcggtgccaaagcttatgcagcgcggcgttgccgccctgcggccgcagtttggttctctctgcggcgagaaagcttaatccctcgtgagcttgcggtgcaggcggtggggcttcgaggcctcgggccccagtcgggaaatcctgttctcctgatacgattcgaagttgccttcgaaccagtaccagttgccggggtcttcgtcggtgccttcccatgccaggatgtgcgtggcgatgcgatcgaggaaccaacggtcgtggctgacgacgaccgagcatcccgggaagttcaaaagggcctcttcgagacttgaaagcgtttcgacatcgagatcgttggtgggttcgtcgagcagaagcagattcccgccctgcttgagcgtgagcgccaggttcaggcggttgcgctctccgcccgaaagcacgcctgccggcttctgctgatcggagcctttgaatccgaagctcgctacgtaggcgcgacttgggatttccgtctcgcccaccatcatgtagtcgttgccgtcggagacgacttcccaaaggcttttcttcgggtcgatgccctcgcggttttgatcgacgtaggatatcttgaccgattcgccgatttcaaggctgccccctgtgagtgactcgaggccgacgatcgtcttgaacagcgttgtcttgccgacgccgttcgggccgatcacgccgacgatgccgttgcggggcaaggtgaacgagaggtcgttgatgagcacgcggtcgccgaacgccttgtgcaggtgctcggctacgatgaccttcgagcccaaacgcggaccgacgggaatctggatgtcggcgaaatcgagcttcttggcagagcgggcttcggcttccatctgctcgtagcgctcaaggcgtgctttgctcttcgcttgcctcgctttcggagaactgcgcacccattcgagttcggactgcatgcgcttggcgagcttggcttgctgctgcccttgcgattcgaggcgcttcgccttggtttcgaggtaggtggagtagttgcccttgtaggggtaaaggtgcccgcgatcgacttcgcagatccattccgccacgttgtcgaggaagtagcggtcgtgcgtgacggcgagcacggcgccttcgtaggtgtggaggaactgttcgagccagagcaccgattcggcgtcgaggtggttggtcggttcgtcgagcagcaggaggtcgggtgcttcgagcagcaggcggcagagcgctacgcgacggcgttctcctcccgaaagctgtttgacgggtgcatcggggtcggggcattggagcgcatccattgcttgggcaagctggctgtcgagatcccaggcgttggcggcgtcgatttcggtttgcagctggcccatctcgtccatgagggcatcgaaatcggcatcgggcgaggccatctcttcgccgatctggttgaagcgctcgattttggcaaggatctcgccgaaagcgagcttgatgttctcgatgacggttttcccttcgtcaagcggcggttcctgctcgagaatgccgactgtgtagccaggtgtgagtcgcgcgtcgccgttcgtgacgtcttcgatgcccgccatgatcttgagcagcgtcgatttgcccatgccgttcggtccgacgacgccgatcttcgcgccgggatagaacgaaagcgtcacgtcgtcgaggatgaccttgtcgccatgggccttgcgtgcctgatacatttggtaaatgaattctgccatgttgtgtttcctgagttcgaggttgttgttgcttggatattgtcgcatgagtggagtcggatttcgaggtcgtctttgcattgtgcagtcaagctgcggccatggggtacaatgaatcgcatgaaaatcgaccgcatgttcaaaatcatctacctgctcatgagccgcgataagatgacggcgaaggaactcgccgagcacttcgaggtgtcggtacgcaccatccaccgcgatatcgattcgctcatgcaggcgggcatccccgtgtatacgagtcgtggatccgaaggcggcgtatcgcttgtggacggcttcgtgcttgacaaggcggtcctgtcgaaggacgagcaggctgagattctcttcgggttgcagagcttgccgggatgcgcgacgggggaggacgtcctcggaaagctgggcgtcttgtttggtcggtctggccccgatcgtgcgaatgcgttttgctcgaactggttttcgagccctttgctgcagcaagggtgtacgacgaattcgacatcgactccatcgagccgtcggatgagggcgggcttcacgtgctcacccgatatcccgacggagaatacctctacgatatgctcgcatcgtttggaagcgccgtcgaagtggtgcagcctgcagaggttcgggagaaactcgaacaaaggaagtgacccccttccgcatatatgacatacagctgtcaggtatggtgcgggagaattgcggtaaacgcacaaggaggtttcaatggaatggatcgaacggtacaagcccgaccaggagccgagtctgtctgatatcgacgctttcgtgggcaccccgctttggggcgagttcaatgcgtttcttcgggagggctaccaggtggagcccgaagtaagttacagcggatgctcggggcagccgggttggaacgtgaaataccggaaagcgggccgagcgctatgcaccctgtatcccatggacggcttcttcatcgcgcttgtggtcatcggtgcaaaagaatacgacgaggcgctcgatgttctcggcggatgcactccctatgtgcgggatctcttcgagcagacgaagccgttgatgaatcagcgatggctcatgatccgtgttaccgatggcgatattctcgacgacgtcaaacagctcgttcggacacggcggaagccgaagcggtaggcgggcggcgtgcctgtcgggcgtctgacaatcgggcgggtgtgaaccgggggctcggcggtcgagccgtgcgcagccgagcgtttggccgtacggcgaatcaccgacttcacccgatcgtgctaccatatgcccaaacgaggagggccgtgtgttcaaagaaatcaaagaggttaaagaagccgaaggcggcaggccttcaggtttggtcgaaatggacgaggtgtttttcgagcgcgtgtacgagcaggtggcgcgcgtgcctgcggggacggtctgcacgtacgggaccatcgccgagcttgcgggctatccgagggcctcgcgcgaagtcggctttgccatgagccgggccctgagcgaatgggatcttccgtaccatcgcatagtcaacgccaagggaacccttgcgccctcatacgcattcggcggcaaggacaagcagcggcagatgctcgaaggcgagggcgttactttcgtcgatgcggaaaccatcgacatgaagaagcaccgctggccgcccgagcccgactcgggagaatcggagcccgagcagctttcgctgctgtaggcaacccgagcccgtcgctttcgccgcgcctctgacgaatgggttacggggagcggttggcggcgactgggcccgcgtgccgtggtaccatgatgcgattgtactgcgcagccaaggagcaagctttgccgattagagtcgataacgatccaaacatcaaccgaaccgtcattgacgaagaacagctgaagaagatgatggcggcgagcaagccgagctttttccagcagaacaggtttcgcatcgtcacgctgatcctcatcgccgtcaacgtggccatgttcgcaatcgaagccgttctcgccggtttcagggtgagcattcccacgaccgtgctcgtcgacatgggcgccatgtatgcgccgcttatccaatcgcctgccgatctgtaccggttcgtcacgccgatgttcctgcacgtcgatctgatgcatttggcgttcaacatggttgcgctctacagcgtgggcgaggtgcttgaacgggtgctcgggcgcggcaatttcatcctgctgtatttcatcggcggcataacgggcaacgcgatatcctatgccgcaagcgtgttcgtgccagggcaggcagcggtgagcgcgggcgcatcgacaagcgtgttcgctcttttcgtggcagtggcgctgctcgggttgctccataaaggaaaccgccgttacttttcgcaatacagcaaaagcatggcaagcatcatcgccatcaacgtcgtgtacacgtttttggtgccgagcatctccatcagcgggcatttgggcggcgcgctcggcgggcttatcgccatgttcgtgattccgagcaagaacttgcgggttaacaacatcgtcaggctgatcgtggccgcggtgtggctcggcgcgctcgggtggctggtgttctcgacggtgtagcgctgctgtggatggcggccgcactgcgcgctactcccatttggggctgacgaacgtatccaccttcttgatgagcgggtagcctatggcggcgcctgccgccgcaccgagtgcgcctccgagccaatctcccggtgaagccgcatctccgaaaccgaaaaacgcaaacgcctcgaacccgactccgaaaaatcccgcacagacggctgcgacgacgcatgccgaggcgagcggcatgtgctgccacagggcgttgacgagcgcgatggcaagcaccgcgaacccgaagacgtttccgaaaggcaccggcacgccgaggttcgctccgaatgcgagcatgatggcggcccaggcgaaaaccagcacccagcgcataacggtaagggctttaggcctcctgttcggcatcggcgttctcgctgctctgttcgatgaatcgtattccatgctgaaaccctaccacgggctttcggcatcattgagcgcagggcgttcctgtgcccgtttcgttatgtaatctaaacgcttacgtttcggcagcgatacccgcccgtgcattgcgcctgcgccttttttcgcgcactctgagaacatgcacggcattcgaaccctgtcggcgggaaaccgctgcggccttttgggagtgagcgatggataaatacgacgttgtggtaatcggatcgggcccgggcggcgctgcggcagcctatgcgcttaaagccggcgggaagcgggttgccctgatcgaggacgatctatggggcggcacgtgccctaatcggggttgcgaccccaagaagatgctcgtgagcggcatggaggtggtggagcgcaacaaccagatgatcggaaaggggttttctcgcatcgaatcgatcgactggcccgagctcatggctttcaagcgctcgtataccgagccgttttcggaatcgttcaagaaaggcgtcgaggagtccggtatcgatgccatcgagggctcggcgcgatttatcggcgatgcgcgcatcgaggtgggcgaagacgtcatcgaagcggatgctttcgtcattgcgacaggacagcgtccgagcattctgaacgtcgagggcaaggaactccttcttacgagcaccgattttctcgatatggacgagctgccggagcgcatggcgtttctcggcgcgggctacatcgccttcgaacttgcagccatcgcgaatgcggctggcagcgaagtcaccatcatccatcataacgaccgtccattaaagggcttcgatgccgaacttgtcggcagtctggtgaaggcatacgaagacaaggggatcgcgttcgcgttcgatgtggatgtagaatcgatatcggaagaagggcagggcttttcggtgcagggaaagaccgaaggggcgcaaagctactccgagcgcttcgactgcgttgtgggcgccacggggcggatccccaacgtggaggccctcgatctggaaaacgcccacgtcgaatacgacgggcacggcatagccgcagacgggttccttcaaacgtcgaaccctgcgatctatgcggtcggcgatgtcgttgccaagaagatcccgaagctcactccgaccgcttcgttcgagggagcctacctcgctcgacgcatcctgggagacgaagccgagccgatcgcgtatccgcccatcgtatccataatgtatggaagccccaagcttgcccaggtgggagtggatgcaacggaggcagccgatcatgctgaacggtacaggctcgacgatagggacatcacgggctggttcacctatcggcgcatcggcgaacctgtttcgaaggtaaagatcgtgcgcgaaggcgagcgccttgtcggcgccagcgccttgagctcgcaggccgacgcgctgataaaccacctggcgatactcatcgacagcggcatcgtgcgcaaggatctcgatcgaatgattctcggttcgccgacgcttgcgagcgacctgtcctcgcttatgtagcgcggcttgccaagacgaaacggagccccgtgccgattctcatcgcacggggctccgcatatctgggtgcatgcttccctacgcaaagagcggcgcggtaaaccattccttcttctcccaatcgcccctgttcgagagcacgtgaaacgcttcttcgaagaagcttgcgatttcggtttcggggtcgcttgagccaagcgccttttcgagcggcaagaaatattcggccttttccgtgctgtagaatccgagcgacgactctttgagcgtatgggagagattctcctcgacgaaggggtagggcagcacgaagaagctcggatcgtcttctgcctcgtctcccggccagaacccgaattcgatgagctcttcgtcgaaggcaaccttttcgatgatgccttcgccggggaagggtgcaggtttgccgctgtacagaacgccggttacgtcgaacgtcccccagaacaggctcggcagcgccgtcttgcagcggaatcccgaaaggaaaccgagaatggcccgataggcgaaggcgaacatgccgaagccttcgcgggcttcggctgcatcgtagcgccgcggttcgtcgttctcgtcgaagggcgtggtgatgcccatttcctggggtacgggattgatgcgggcatccgcgccgatctcttcgagcatgcgctggaagtcggcgtagtaatcggcgatcgagcgtccgtcgcgcaattcgaaggagctgtgcctcccatcggtgctcacggcggcgacggtcgaatcgaagaggtcgatcgtcacggtgcatgcggcattcgcgcacggcacgaggccggtggtaaatccctgtgcggtcagcggcaaggtaacttgctgccattcgggttgcgcgggcatttcggcgagtttgaacttgccgagcatctgcgaaacgagatggatcgtctgcgcggtgctttcccaggacgaatatgcgattgctttcatggtgtctccttaatcgaaggttctttcaaggttgccgggtgcgtttggccccatccgcccagtcgcttttcgaccagtttcaagagtgcgtcggcggcgatggcgagacctcctgcgaggatcgcaccccagaggattttgacggtgttcatggttctcaagccatcgaagagcagggtgccgatgccgcctgcgttgataagtgcggcgatggtgatgatgccgatcgtcgagacggcggagagccgaattcccgtgaagaggaccttcttggccagcggcagccgaatcttgacgagtatctgcatcgtgctcatgcccatgcccgtggcagcctctatgacggccggatcgacgccttcgaggccggcgaggaagttgcgcagcagaaggtactggttgtacgttacgagcacgatgagggccgtggtggtacccagccccgtcagggggatgagcagcacgaacaatgccaagctcgggatggagtatatgatcgagaagaggtaggtgagaaaccgcgcgagcgctttcgaatacatcgacgcgatagtgagaaccgtcgcgaccgcaagcgataagacgagtgtgacgacgagcagttcgaggtgctgaaccaggggcgtgagcagtttgtcggggtatgcgaggaggtagtcgatcattggagttcctcccaaaagcgctcctgctcgcgtgccgaggcgatgagcgatgcggtgaaatcgtctgcggggttgagcgcgatgttgcgcggcgtgtcgaactggcgcacgcgcccgccgtccatgacgatgacgcggtcgcccagcttgaaggcttcgttgatgtcgtgggtgacgaagaggaacgttttgcgcaggtccctgtggaggcgaagaagctcgtcttggaggttggtgcgggtgatcgcgtcgatcgcgccgaacggttcgtcgagcagcatgatcttcggatcgacggcaagcgcacgggtgagtcccacgcgctgctgctggccgcccgagagctgggaggggtagcggcccctgtactcggcggggtcgagccccaccacctcgagcagctcgtcgacgcggcgttcgatggcgggtttctcccacttgagcagcttgggcaccgtggcaacgttgtcgccgatcgtcatgtggggaaacagccccacctgctggatcacgtatccgatgcgccttctcacgacaaccttgtcaaccgtcgagatgtcttcgccgaacagcatgatggttccctcagtgggttcgtacaggcggttgaccattttgaggagggtggtctttccgcatcccgatgtgccgagaatggtgatgaattcgccttcatcgatcgagagggaaacggagtttacggccggtgcgctcgcatcggggaaccgcttcgtcacgtcgatcatttcaatggctttcatggttgcgcgttcctatcgtttttctttcggcaaagcccgctttgcccgacgcgactcgccgggattcggtgccttccatcggtcttcctgtttcggtgctacttgatcgagtcgtagtattcgcgagccacttcttcgtattcgcgcttgtccacatcgacggcggcgttcagcgccgtcacgttttcagtggtgagggttgcgctcaccctgttgaggatgtcggcgatttcggggttcacgttcaggacgtcgttgcgcacgatgggcgcgaggttgtaagggggccatacctgcaggtcgtcgatcagcagcgtgtattcgtcggtgttggtgagctggccttcggtggtgtaggcgggcgatacgtcgccgtcgccgcttgagagcacgctgtacttcaggccgttgtcgtagactttcgatgatttccagtcgaatgcgccgtaggctgcttcgagagctggcaggccgtcctcgcgcgcatcgaattcgccttgcgaggcgaagttcagctcgcttgcgtgcttttgcagatcggatatggttttgattccgtattggtcggccaccgaagtgcggatgacgagaccctggccgtcgtttgcctgcgagtagtcgagccaggtgatgtcgaactgcctgtcgtattcgtctttgacggtttcgtacacctcttcgggatcggtaatcatatccatgttgagaaccgagagcaggccggttccggtgtattcgggatacagatcgatctcgttgctcgtgatggtggtgtggatgaccgagcttgccactgcgggaacgcgctcgacggaatatcccgcgtcttcgagggctatcgcgtagatctcgctcaccacgatgttttcggtgaaatccttcgatcctacgcgaatggtatccttgccgtcggttccgcttgcgccgtcgcctccgctgcatgcgacaaggcctatcgccaagcctacgacggcgaggcaggcaaccagttgtttcaggggtttcatagatccttctttcctttttgtatgtcggtgcgtgcttatcaggtgctccagcaagtcgaacagcaggcttaccgcaagcgaaatgagcgccaccgacacgccgcccacgatgacgagatccattctgttcaggccgagccccgtgaatatgagctctcccagaccgcctgcgccgattttcgcggcaagcgtggcgcttgcgatgatttcgatcgcggcggttttcatgccggcgaggacgagcggggttgctaaggggaatcgaaccttgaacagcagctgccgatcggtcatgccgaggccgagacccgtttcgatgattgcgggatcgacttgggcgaggcctgcggtcgtgttcatgaggatggcgggcacggcgagcagtacgagcgcgatcgacgcgggcagcacgcctgtgcccatgatggggatgaacagcagcaggatcgcaaggcttggtatgacgcgcaggatctggaagaatgcgagcagcggcttgccgcctcgttggtgcttccagcagaggtaaccgcatggtacgccgatgatgacggcgatggcgaacgctatgaagcttatttctatatgctgcagaaaagcctgctgcagttcggatccgttggcgctcaggtattcgagaatcttttcacccatagggactgctgacgtttatccgctgttgcccgggcgctctacatgcccacgaaggcgcgggcttcgaacataaggtcgctgaattccctgaccgtttcatcgcgagcccagtcgcgctgcagctcgcagatcagctgggggatcgtgatcagctgcgcgccttgctgctcgatgcgtcgcagggctgtttcgtgggcgagcagacttgtgccgccgacggcatcgacgacggggtacacctcgtaaccttcgcgcatggcgtcgatcgccgggaaggcgaggcagacttccgtccatagcgcgcacgtgatgagtttctttctgcccgtgcgttcgacggctgccacgaacgcgggatcctcccaggagttcatggtggtgcgatcgatggattccacatcgctcagcacttcgcgcaagggcggaatcgtatcctggttgcgggtggtggctacgttcacggtggtgagaaccacgggcagatcgaaggttttggccgcgcgcgcgacaagcacgatgttgttgatgatgtcgcttgcgcgggccgagcctacggagtggatctgggtgggttggtaatcgataacgacaagggctgcgttttcgggagtaagcagatggtctgtctgcggattgcgcggctgcgcgacgttgctcatggcggcgttcctttcaattgggagcctgatgctaccttttatggaattgtagtttgcgcctgccgctttcaggtgaagcgttgcctgtgtcgctgtcttgttaccgtgacgtaagaatgtgcggcccgttgaaatggttgaccgttgctgaaagaggtgaacgatatgggcgagatcgaatatgcggttgccccttgctccggggagctgctcgggggagggatttctcgaccctctgggcataacgcgatattacggcaaacagccgaggcggcccgggaggatgggccgtctcggcgatgcgggaggatgggccgcctcggcgatgcgggagaccgggtgctgcgagcctggatccgaccagcccttgctaagccaggggcgcagcagcgatgttcttgccggctacgtagccgtagtacatagccatggaatggctgatgcccggcagcttgaacgggtacttcacggcgaagcggtcgccttggatgttgcccacggcgtacaggccggggatgggcttgatgtccttgttgtacacgcggcactcttcgtcggaacgcaggccgcccatggtggtgaggcagaagccgagccctgtgcgctgagcgtagaaggggccgtcctgcacgggccacaggtacttctcggacttgcggaagtcgtcgtcgtagccgttagcgcacatctcgttgtatcgctcgatgctcgcaagcgcgctttccgcatccatgccggggatggagttcagcagctcttcgatggtttcggctttgaatacggtctcgccgtccacgcgctcttccatttgagccagggtccacggtccgcggccgagcacgcgccccttcaccgggtcgaaggacagaggcgcttgttcgtcgagatgcgagtcgaagatgaggaagcacttgccctggggttgcgattccagcgccacctccacgtcggtgcaatcgatctcctcgttcatgaagcgcttgccgttgtaattcagatgcagatgaggcgtggtcatacccacgaggctcatgtccgccgtgtcggcgtggccgcccatgacatggcacatgggcgccatgttcaggctgaagtcggcaccggcccacgcgccaaggcggtaaccgtcgcccgtgttggtgaggttgccttccgcgtcgtagttgggccatgggttgaggttgcccaccttcaccacggtcgggtagaacttggccatgattccttcgtcgctttcgcatcctcctgtggccaggataacgccgttgcgactggtaatcttcttgtactggccggtttcggcgttgcgggcgtagacgccgcgcaccgtgccgtcctcgtcggtaatgagctgctcggcgaaatggccgtagaaggcctgaccgccggcatcgattgcgcgctgggcgttctcgttcaccacgtgctcgtggtcggtgaagtaaatgcgtacggggtagaacgccttgttctcggtccagtcggcatcgcgatagctcatcgatgaaacggcgtagggatgctcgaggcttttctggaggtactgtccgttgatggcgtcggcttcctcgggggaggcagggtagtagatgtccgggtcgcctgcggcccaccagtcgaacacctctgattcgttctgcaagaacttgcgcacgatgcgataatcggagtagccgcccgagttgccccattcctcctgggcgagctcgtcgatgtcgagttctggaaggcccaggttctcgttgagggatccgttgacgtagcagtagttgtcggagcggcactgcggcgtggcgcccttctccacggcaatggcgtcgaggccctcttccgcggcggaacggaaggcggcaacgcccgaaacgcccaggccgacgatgacggcgtcggcttcaagcgtctcctcgatctgatcttcggggatggcttcgggcgcgtcgggccagggatattccgaagtactcgaggccgaggcgcttgcattcgcaggcgcggcttcggagctgcttgcggtgctttggggcgcgcagcccccgagggcggttgcggcgccgcccaggcccaaaagcgcggttcccgtaagaaacgcccgccgcgacaacccgcgggactcgccctctttcgcgagggccttctgctctgctttcggtgtcttcatgatgtcgatcccctttcttgagttgcgatcaaatgccgcataaggcgccgcgccatcctgtcggctcgttggccgtgcattgttcgtttgcgccaacggttgggatgcggcggagcgtgcgacgggggccagtatggatccagcggtgggagggcaccatcgttcagggggtatgaaagcagcgcttcttgtcacccgaaaacgggtgacaagaaagaatagccaggtcggattgcttcagaggaaagaaaaaccccgtgcgatcatcgccagaagagatcgatgagctgctcgcgggagtggacgtcggtcttttcgtagatgcgccggatgtgggttttcacggtgttgctggaaatgaacagcttttcggcgatgtagggtgccgaccgcttttcgagaagcaacatgaggatttccgtttcacgctcggagaggccgtagcggacggcgagcgcctgctctctgcggcgggcttcgccgtcttcgcgctgggggcgtcggcgcagcagcgagaatgcgacgattgtcaggaagacgatgcgcagcgagacgctgatggatagagccagagcgtcttccagaaacgggtaaaggctcatgacgagaagtgcgaacccgagtacgacggcattgacgaggcacgcagccaacggcaaagcagcacgcgaacatgattctcttgaaaacgacgtgaggaatattgcgccgatggccgcatcgcagaacccgagcacggggttgaagcttgccgatgggcccgacgtgtcaaggccgctcgtctgcaggagccatgcaacgacgagaagcgatatgcaggccagcgagccgattttgcacagggcgtcgcctgcggataccgcggcggcggttttccctctggttgcaatgacgccaacggcaagaagaatcgctcccgccgccagcgatccgagggtgctggcaatggatacaccctcgccggcgtcgcttcgaatgacgagggactcgctgttggcgccccacatgcagccgatggtgaacacgcagagcagcaggcaaccgatgttgatccagctgttttggaggaattcgcccagatcgtgtttagatgcaggcgttgaagcgtcgtcgaggggggtttcctctggacgcgttgagacgacgagaaggagcgctgccatcgcgtacatggcgaaccagacggcagttcccagtcggttcgggaaggccagcaccaggagcagtttcaggagggcggcaaggaaaagccccgcacctgcgatgagaagagcctgggagcgcgaaaagcgatggagctccgcctcgatgccgacaatggcgaagccgaagcccatgcccaaaaagatgcttgctatcacagcggctacggcgacgccgtctccgtacagggcgacggggatggcgatggcgctggctgcgaggaatcctgcgcagagattgcggcgcaaggcgaagccaagggcggctaaaatcgtaagaaggacagacgttgcgagcgccgaggccagggcggagcgaaacaccgtccaaaacgcgcttgcgagcggggaggatgaggcgatgagtcggctggagtctgcgaagagaagcaaaaggaggaacagagacgccactgcgagaaccgtcatgccgctgcgcaccgcgggcacaccttgccctttgcggatgttcacgaacccaaagcctccctctcttcgttccagaagcgcctcattatatcacagggccgacctttggctgccgtgccgcccgcggcgatcgtttttgccaaaacacaccatgcggcatcgggaaaacctcggattctcacagaggttgattttgcgtctagctggcagaatcgcacaccgagaagcggcgggcgtcaacaagcgaacctatgcgaactcgaggcaggcatctgcggaattgcgcgaccgcaaggatgggcgcgctttcttaatcgggcagctgtcggctgcgcctagtcggatgcttcagggatttcgctgctcgcctcgccgaggcgcctttctttttcgagttcgtcgaacttggccttcatcgtggggttgttgcgcacgagtcgcttgatggtgaggttttccgccttgtcgtttgccaggcgcaggtttctatcggaagacagcagcgcgtctttggtcttctgcagatggtcgatcgtcttgtcgatctcgtcgatggcggtttggaacttgcggctggccagttcgtagtttcgtgcgaatcccgtcttgaaatcgttcatctgctcttcgaagttggtgatgtcgatgttctggctgcgcagcgtttgcagctgcgccttgtattcaagcgagttcatgcccgcatcgcgcaaaagcgtgatcatggggatgaagaactggggccggatgacgtacatcttcggatagcggtagcttacatctacgatgccggtattgtagagttcgctttctggttcgagcagcgaaacgaggatggcgtattcgcatcctttggtcgtgcggtccttgtcgagctttttgaggaaatcctcgtttttgtgcttggtggcggtctcatcgttctcgttcttcatctcgaacatgatggagacgatctcgttgccgtcttcgtcgcactcgcggaagatgtaatcgcctttgcttcctgcgctcgcatcgttgtccttctcgaattgggctcctttgaaagcggttgcgcgcagcttgttgaattcggtttcgcaatgctgctcgagggtttcgccgaccatcttggtggagagcttcgccttcatgtcgcgaagacgctcgatttcttggtctttgaagcggatgatttcttgcttcgagaggatctcgctgtgcatcttctctctgtacgacgcctcgatctgagccttctcgctttccttgagctttacttcgttggcaagcgcatcgcgctcccgctcggctttcgagacggcttcgcgcaccgcgagctgcttctgggtttcgaaggcctcgatttgagcccgcagtgcgtcgcgttccttttcgagcttggcggctgtttcctgcacagcaagcagcttctctttgtcgaaggcctgtatctgtgctttgagacgttcgatttcggagctcttctgattgagctcttcctggacgcgcaggttcagcttggagaactcggtatccttctggctaagctctttctggttctgggcggcgagtttttgctggacaagctgtacggcctgctccttctcgcgctccatcgcctgttcgcgctcgcgaatggctttatcgaattcgtgattgcgtacttgctgcaagattgcagcgtaatcggattcgtcgacggtgaaaacctgtccgcagctcgggcatttgatttcgttcatgggttcttttcctccaagctcgaatgacttgtgtgttgatcggtattgtagacgagtccgcgcatgtgcatgtgtaccgaattggggtcaagcggtggctttttggcggatgagaggtggcgcttctcggcgagcgacggatccttgatgtggcgtagctgtaccgatataggtacagctactgtgtaaataagaagtattgttcatcgcaatggaaacgagataagaatggtggacagtatggcaaagaatacggcgaaattcgtcgacgaactacaaagggagcgtgctcttttcattcaattcgaggaaatcgaacgcaagcgcgaagcggaggcgatgacgagcatcgaggggaaggcgaatgcgctcatcgatctgttcgcctcctatcggcgccctgcgtagcggtttgcggcaggcccctacacgacgactccgtcgcagtgatcgatttcgtgttggatgatctgcgcggtccagccggtgtacgtcttcgtcttctcgcggaattcggcgtcttgatagcgcaccttgatagtgcggtagcgcgtggcggggcggcgtccggcaagggaaaggcagccctcgtcggcggcgtattcgccggcgcggctgacgatctcgggattgtacatgatgcggtacgttccttcgtcgtcgaaggcgatgatgcgcttgagcatgccgatcatgttcgcagccatgcccacgcactcgtggctgtgtgcggcgagcgtatcgagcaggtcttgcgctgtcggagcgtcgcttgggcctgcgggttctgacgggcgggcgaggaacagctggttggtcatgatgggcttgatcatgggcttccgatcttgcgataaaggatacatgttttttctagtgtaggtcggtttcgtcccgcgtgtttttttggattccagtgttgcggaaatctccatttgacttcgagtccgctccaggttctacaatcgcagggaaagcaatcgaacaggaggaagcaatgggcaagaaaacattggtggcgtacttctcgtgcagcggcgtaaccgagggcgtagccgaatcgttggcgaaagcaacgggcggcgatcttttcgagatcgtgcccgaggagccctataccgctgccgatcttgattggacaaacaagtcgagccgctcgaccgtggaaatgaacgacccctcgtcgcgacctgcgatcagaagcgtcgtggtggatatggacggctatgatgtggtgttcatcggctttcccatctggtggtacgttgcaccgaccatcatcaatacgtttcttgaggcgtacgatttttcgggaaaggcgatcgtgccgttctgcacgtcgggtggaagcggcgtcggacgtacgggcgaggtgcttcaggcgctctgccccgactctgtttcgtggcgccctgtcaaactgctgaacaatgtatcgacggcgagcatgcgggcgtgggttgagggcttgaacctgtaaggcgtttgcgagcggcggggcgggttgcgggcgccttcggctacgggcttgagtgagttttgtgtcccgacttccgattttctgccgaaatgaaccgatctgaagggaatcggtcctaatttgcggggcgctcgatcctcggatgaggagtattgcgacccattgcaatgcggaagaaaaatacggccttgtgatctggtgttttgcgatgaagtacagagcgcgtcgcatgccgtttgcatgttatctgcctgttgcgagaaccagtccttcagatcggttcatttcggcgaaaatcggcggtttgggttgcgatttcggatcggcgcagtttcgtgtcgcggttttgggttggtgcactgttggacaggtgggtgcgattcgatcgcgaagctgcggttcgggtttcgactacgcgcgttgcgtgcaagtgcgctatcgtctgcgggcggcagggtgcttgcagacggcaaagcggatcgcgggcgctatcgtgccacctgcgatccaccctgccttttgtggcgcgctagattttcttcggtttcgtcgtaagcaggcgcacgaacgccccgagcccgtcgggcaggggtttgtatcgcttgccgtggagccacatgctctgcgcgcgcatgccctcgaggtccgacggttcgatttcgagcaggttttcggcgcaggtgaagaagctcgcctcgtatccttcgcgcaagacgcccttcttctcgccgagcatttcgccgccgttgacggtgtatgttttgagcgcctcgtacgctgagagcgactggtcttccacgtagaactcgcgcataccgtgcatctgcagaaacggatccaccgattgcacgggcgcgtcggtcgatccgcagaggggtacgcccgcttcggccagccgcgcaaggggaatttggctcgctatctggctttcgctcaaatagcgctcgtagccgtgcaggtaccgtttgtcgatccaggcgtagcctggctgcaccgtaacgaagggcttcagcttgcagacgcgttcgacggcatcctctgagggaaactcgcaatggtcgatgcgatgccgcccgggcacgcgctcgaagatgcccaccagctgatcgatggctgcatcgccgatagcgtgtgccgaaaccatgaacccgcggtttgcgaagccttcgatggtgcgtgcgagttcgttatcgtcgaagtagagcgagccggtagaaccgtcggcatagggctccgaaaacgcggccgtgcgcgacccaaccgagccgtcgagctcccatttcatgcagcctcccacgcgcttcgcgtccatgcgggggagcactttttcgagtttctcctcatccatgtactggggaaatatgcggacatccaaggggaagcgctgcgcgaggaacgcggtgagttcggccatgcggtcgcgttcgctgtcgtcggtgccttcgagagcgcacacggtgccgattccgtaggcggcgcactggttgcagaagtgcgcgatgccgtgcgcaagggcggccggcgtgatgctcgaggccaggtggtcggtgaacttcccgaggttcgcatcgtgggcggggccggaaagtatgccgtcgggtgcgacgtccccaagctcaagcgcattgaggagggcggatgagcatgctcccgaatgaccgtcgatgttgatgatccaaacgggcgcgccatccgcccattcgtcgagctcgtagcggttgggcaggcgcccctcgtccatggcggcggaaacgtagttgctgaataccagaagcgatccaggcttcgatttcgcggcataggagcggatctcccgttcgacgcccgcgaggtcgtgcggttccacgcggctattcacgatgttgcagatctgctctcccatgcttgcgagcgcgatggcttcgagcatatgcagatgcgaatcgatgagagcggggaacacgtgtgcgcctgcgaggtcgatcgtctgcacgttcgggccgtcggctgactcatcgaaccctacgatcacgccgtcctcgaccgtcatcgaacgatgcgcgtcggtttcgctttccatggtgtggaaggttgcgttgacgaaaacggtcttcatggcggctccttaaatgccgactgcgctgccgatggccatgaatagaaacgccagcagcacgataacctgcatgggggtgctggctagagcgtccgacaggagcagcttgccgttttggcggcggcagcgacgaaacgccggcaccacgagaaacgccatcatgatggcgatgaggccgccggcagtgcgcatgatgtcaaggaatccgccaaggttcaagagcacgaggatgagtgagggcagggttgcgatgagccagcacaggcggcggttccacttcgtctgctcttcgatgatgtcggacagtgcgagcgagatcgaccagtaggtggtgagcatggcgagcacggtgaatgccgatccgagtacttgggcccaaagccctatgccctccgaccagccgatcatcgcgagttcggtgatgcgtgcagaacttgcaagcgagcaggtgacgatgacgacgatgaacatgaggttgagtccgagcccgataagtattgccttgcgcacttttgcgggatcgcgatcgagcccctcgacggcttgcggcacgctgaagaatgcgacgaacgagaacatggccatgccgaagaaggcgagaatctcgttaggctggcctacggtatcgaagggaagcgggttatgccagttgaagagcgaagcgatgccgagtatcgccacgatgacgatgatgatgctgaccgatatggcctcgctcacgccgagcaccttgagcccgaagaacacgacggctgcagcgatcacgtagaacaagagttgggctgccaagggaggaaggcccgccgcttggaatatctcggcaccgccggcaacataggcggcgaggttcgtgatgagtacgagcgtggtgaggacgaacagcgcgataacgaacacgttgccgtgcttgccgcggaacaggtacgtgcggaacaccgagatgacctgcgtgcccttgccgcttcctatggtgatttcggcgagcatcatgtgcatgcagtaactgaagaagaacgctgccaacatgatggcgaggccggggatgagcccggcgcgatccacgaggtagggaagcgtcataacgccgctgcccacgccgtatccggtgatgatgcaggctgcctgccaaaccgtgagttttttctccatgggtagaaatccgttcttgtctatcgaatgccaaacgcaacctcgcattgtacaccgcataggggcgcttcggaaatgaggggttgcttgaccagggcgcgcggcgaggggttcagctgcgcttggagccctgacggctgataccgcccttgtggcccgacgccttgttcggacctatgcctgcgcggggaacgttgatcgcccgcggagttgtcgggcgcgcgcttttcgcggcgagcgcacgcgcccaccgttctctatcagggttgttcggggctttggccaaggtgtgccttcttgcgcggtgcgctaaaccagtttgcccttgcagtggtcgatcatgtgctgaatgatctgagccgtccaccccgtgaaatccttcttgcggggcgcgagcgcgccgtcgacgagctcgtcgtaggcgaccttgatgcggtcgtaacgcgtcactttggattcatcttcgagggagaggcagccctcgacggtcttgaacgcgccgagcgcttgtttgagcacggggttgtacatgacgtgcggctggtcgttgtcgtcgagatacacgatgacgcgcttggctacgccgatctggttggcggccaagcacgcagcgccctcaagcgacgcgatggtatcgagcagatcttgcgctacggtttcgtcttcggccgttgccgcctcgcagggctgcgagaggatcgcttcgtcttttaccaattccttgatcatggtgctcctgtcttgggtggggtgattcccgcgctttcgctaggtgaaagcgcgttggcttcctggtgaattctagcacgaaggcgaatgcttgttgatcggtttgaaccgacggcagggaagtcggtcccttctctgctggaaatgcaagcgcgatttctttcaagagaaagaccagggcttcgatgctgcaagctcggtttggcctcttcgttttctcggatgatagagcgatcaccgcctgatccttcttgccgatggcgtatatgctgcacaatcgcgttttgcgatagaatggcattgactggtgatcttttcattcggaggtataaggcgataccgagaggcgcagattcatgaatgttgttccaaccgaattcgttccagaaccaccaaaaggctcgtcgttcgttatcgatagatgccctttccgctatggcgaacgtatcgatatggctgttttaaacctagctgaggataagatagtcaactggccgatggtgtacatattggctaacgaggacactgcctacgtcggtcaaacgacgagtgttgccaatcggataaaccagcacggcgcaaacgaggaaaagaaagactttgccagcgtcaatatcgtcttcaatgaagagttcaacgtttccgctgtaaccgattacgaacatcgccttatcggccttatgcacgccgacggcagatacagattaacgaacaagaacgatggcatgactgatacgaactacttttcgaaagctcagtatgcaggcatgttcaatgatctctgggaagagctcaggcgtctggagcttgctgaacacacgattgacgaaatcgaagaatccgaggtgttcaagtattcgccctataaagggttgacccccgaccaaagggttgcgctcgataagatactcgaagccatcgaaggaggtcttgacgatgcgaagcccatcgtggttgagggaatgcctggaaccggaaagacgatccttgcgatctacttgctgaaggccctgaaagacaatccaaagtatgctgggatgaacgttcggattgtcgaaccggttacatcgcttcggaataccctcaagaaatcgctcgctagcgtaagcggtatgaacgctgatgacataatcggccctgccgatcttatcaagcccgattatcgatatgcgggaagggacgcgaaaagtttcgatatcgtccttgtcgatgaggcccatcggttaaagcggagggtgaaccttggtactcagttcgggaatttcgacaaagtaaacgaagagcttggtttgcctaagggggcaaatcaaatcgaatggatactcgatcaggtgaagctacctgttttcttttacgatcccctgcagacggtagggccctcgtgtgttggaagggaggctgttcgatctgctcttggcgatgctgtttccagtccgataaggcttgatagccaaatgcgagttaagggcggaaaagactatctcgactacattgcctctgttctcgccgatgccgatcctgagccacgaacgtttgaggggtacgaaatcgtgatgcatgggaggttcgaagactttgttgcgagctttgaggagacctgcgaaaagcataccttgagcaggatgattgctgggtatgcttggaagtgggtgtccaaaaacgatcccgatgcatacgatatcgaaatcgacggcgtcaaaaagcgatggaattgcacttatgacaactgggttggaaaaggcgtagacgatcctgccgttgctcgcgaggtcgggtgcatccactcaacgcagggatacgatctgagctatgcgtacgtcgtcattggcaacgacattaagctgaattcgtcaactggaaaactggaagcgaataagaacggttatttcgacaggaacggttatgcgactgcttcgcaagaagagctgacccaatacatcaaaaacatctactacgttctgctgactaggggaatttacgggacgcatgtatatgtgtgcgatgaggggctaaagaagcattttagccagtatttcgaggtgatcgaatagccacaggatgaaagaacgattgctgcatctttgcccatcttggatcgcctgccgtttcggttgctttgctactgcggatgacgaatgccgataggcatctagggcgctttgtcttacgcgaacacccgtctctttgaatacgtgttccgtattgaagcatggcgaatggcacgatgctttcgacctggcatgagcaacgaaagctggttgttgtatgaacattggttgcgcaactgatccttacgacagggaatcaagcttgtatcttatggcgtacctcgatgtactggggactactcaaaggatagaggatcgagtccatgcggatgaaacgctcaatatctttcataacctttatgccttcagtacttcgatagcgggggagatattcaaggaggaagcggaaatccgttttcgtattttttctgacaatcttgttgttgcattgcctctttcggacgatatcgagaagcagcatcggatgattgttttgtttttacgagctatccgcaacattcagtcttcatgtgtcggagattgcgttgggtggctgcttcggggtgggataacgatcggttctgcctatatggatgaaggatggtatggggcgaggctcttgttgaagctcactatttagaggatcgtttggcgatctttcctcgggtagtgcttgccgagggcacggcacgttacttgctggaggacgaggaattatccgtcttcgttaaccaggattttgatggagtttattaccttaactacctttcgaattggtcgtactgcggagaggtgcttgcagcgggctttgagcggatgaaacaagaggctatgccgaacgctcgcttcgatgtgatgcagaagttaaggtggcatatgaattatgcgaatcgggagctggagagaaagggagaaagcgcgcgtctctccctctaagccggtaccgggaattggtcgttgccgaggcgatctttgatgcgttttctctagagcttggatttttttcggacaggtattcaccttaagagccttaaatcccaagatcagcaccttaacccccatcaaatatggggtgttttggtctgacgatcaaacccctttcaccatgaaatatgcggatttcgtacccgcggccccttcgccatactccttggtaatccatcggccttgaggcccatgaaggcgagataggaagttaggggtgacgaggcgggcagccgatggtcggaccaagaagaactttggactcgaaaggtgagagagatgttgggaaagaaagaggggattgcgtcgcaaagcgcgaagctgcgaatgctgcttgcggttgttgctctgacggctatgcttgccttggcgcttacggcatgcgctcctggcggatcgaagagcgattccgctggcgacgggggcgttgattgggatgctatcatcgccgagaatccggacgacccgtttgtggcgagctattcttcgggcgatgacgaccaccttgtaaccatgcaccagaagcttgggtacacctgcgccgattgtcatgacgatgccgatgctcagctggtggggactcttgaggagccggtggagtcgtccgaatccaacgtagggacgcgcgaaatgtgtttgaacgaggcatgccaccccagctgggacaagatcaagaaaagcaccatcatggacggcgagtctaccgtgtacaacagagatgccaaatacaacgttcacgacaaccatcgcggtgaagtcgattgcggcgagtgccatagcatgcacgagacttccacgttgaactgcgttgaatgccacaaccttggcgagctgcccgagggttgggatggatacgaataggaagggaggaaagatgggagcaaaggtatcacgtcgcgatttcttgctgggttctgcggttttgggaacgggccttctggctgccgcccctttggcggtcggaacgcaggctgcctatgcaaaggaacccgatagcgtcgaggaaatcgacgaaagcattgagccgtccgaagtttacgagtgtgatttctgcgtatgcggatccggcaccgctggcctctgtgcggcgaaccgcgctgctgagttgggtgcgaaggtcatcttggtagatgtggtgacggaaaacggggtgggcggcaattctcgttacgtagaaaacatcgggcacatagccgtcggcaccgataatgccctgcaggctcaaggcgaagtcgatacgttctacgattctctttctgcgtatcatcgctatgcaggcaacaccatcatcacgcgccggttctctgatacgggcgaagaggttcgcacgtggacttcggagttccagggcgttacgttcaacgcgcgcggaaaatacgacgagggtcccgatgagatgtcgggcggcatgaacgccgttatgaccatgtacgaactcggcaagagccagggagtgcagtttattttcgatgctcgcgcattcaagctgctaaccgacgagagcggggctatctccggcgttttgtgcaagagccgtaataacacggtgatccaggtgaatgcgaaggccgtcgatctttgcaccggcgggttctcggcgaaccgcgagatgttcgaaagctttacgcacgtgagctacgacaacgttatcgctcgcggcaccatgggaacgcagcgcggcgacggcatcaccatgggcctcgagcttggcgctctgctgcatcaccccactgccatcaactactgcagccccgtccttccgggccactacaacaagggcgcgctgactatctgcggatgcaaccaggcggataccatcttcttgaatcaagattcccgtcgcttctgcgacgagagcgtcatcaaggactggacgctttccggcaacatctgcagccagcagcagcacgtgtatacgatcatcgaccaggacttcgtgcagaagatcatggacgaaggcgtggtgacgcgccgtgccaactacttcgaacccggtacgcccgttcccgagttccaacaggagatcgacgacgcgttgacgcgcgagaacccacgcgtgttcaaagccgatacgatcgaggacctggccaagcagctcggcctcgacccggaagctgcggcagctgagatcgagaagttcaacggatacgtggatgcaggcaaagacgccgattttctcaaggatccagaatacctgcgcaaggttcagacgccgccgttctacggcttcaagaccatgcttgcgttctataacacagtcggcggcttgaaggtcgacgaatacgcgcgcgttatcggaggcgactacaagccgatccccggtttgtacgcgggcggttcggatgccggcgggcttttcggtccgtattacgatgtgagcatcgcacccggctcgacgcagctttggggtcgtgtttcgggctattgggctgcgagccatgcggtagaggagtatatggcgtagtcggcgggatcggctaatacggttcttttcccttctggtgaggcggcagtggtctgaggaaactgccgcctcgcctttgcgctgtctacgggtataattatctgcagagagattcgcgcttatcatgttgctgtttgaagggaagttgaaatggagaaggcgaacagatcccgcatcttcgttgcggcgctgggcttttcgctgacgtggatcttcttgcagccgagcactctcccgtggccggagcaattgggggagggtggcttttccgatacgtggtacggcatacttttgggtgccttcatagctctatccattgttgtcatcgctggtcggcggtatgtggagcggttcattgaaggccacagggtcatcctgttcgttttgatgatgctgtcgttggcgggattcgccctgcttcagtcggcgggatctttcggttcggctgagctgattgcatgctgcgccgcatcgctgcttgccgtggggtatctggcgataatcatggcatggatatgcggaatcgcgacgcttggcggggcagaggcggggctggtggttgtcctctcggtcgtgcttcacgtgctgatccgatccgtgttcattgcgatgggggacgttctttttgccatagacagcttcggtccggctgtttccggtgttttatggcttgtgtttcgtgcgctgggggacggggatcctgatcggcttgaggttgactctgtcgagagcgggcgttcgatcgaatacggcatcggcgtttttcgcgatcctgcgtttgcgatggtgggggcgtatgtgctttgcatcatctgcgggcgtataaccatgggcgtatatttcaatacgctgggccacccttccgcagacacgctgctcgtgcgcaacgccttggttggattgctcgggttgttttatctattcgtatggcgaaggcgccccaatgacgagcggttgtcgttggtggcgtggataccgccgaccgtcatgctcctgttcgggcagattgccattctcgcgctcggcgcggagcaatctcctttgagcagcgcagctatcacgggtgcgctcatgtgcctcgaggctatttcgctgatcatgttgtttcggctcgcctatcgaaagcgcgcttcagcggtgctggtggttggatcgggcttcttggtcgcgcggttgatcccgctgggcatccagcgctcgcttgcgcttcagctgatctcgtttttcacggtgccgtccagctctcttgtatttgtggtcatcaccgctgtcatggtgatcatcatcggcgtgttcgtggtggtttttcgctttgccatcacgtccggctcggatgtgcgggttttcgcgcaaaaagatgcggttggaaggtcgggtgagcctgcgagaccgtcgcgtgaggagatcgtgctaagcataggaaggggagcggggctgactccccgcgagatcgagatcatgggtctggtaatcgaggggaacagccaaaagaggatatcggagaagttgacgctttcctacggcacggtccagtggtacatgaaggccatctataagaaactcgatattcactcgaagcaggatttagtcgatctggtgcaggagcggttggggtgagggaaggcagatcgcttcgtttggcgcttttggccgcctcgcgagaaaccatgcccggctgttggtcgtaatgtcgattttgcgtaatggccgcagaagatcttcggacggatcttacggacgtcatcgtgagaaaatcgcgcgtgctataatcgcggtatggggattcgcctgaggattcgggcgcaagatgggatgggttcatcgcgcggcgtcagggggaagcgtgacgaaatctgggaaatacatagctatgctgcccaccaaggttcgcagacccgaaccgtcggacaaagcggtggtgcgcgagcgcgtggtggagaagatgtcgcgtgctttggactacaagatcgtgacggttatatctcctgcagggtttggcaaaacgactgccgtttccgcatggtctgctacgttgggaaatacggccgtcgcctggttgcacgtggacgaggtcgattcgggcgcagatcggttttggagctatttcctgggcgctctcgaggttgccgatccgctgctctgcgaaaagctcgatgcaatgctcgcgcttcaagggcccgtgcccgcgtttctcgacgagctcatattggggcttgcggcatacggaaagccctgcgttatggttttggaagactaccacaggctttctggtgcgggcgagattcacgaaggtatcagctacgtcatccgtcatttgccggaaaacgcgcatctggtcatcacctcgcgtgcgacgctgcctatcccgctgtctcgaattcgcgtgcgaggcgagcttcttgcggtagacgagggggatcttgcgttcacgccccaggaaacggggcttgccatgctcaagcatggggttcggctgtccaaagacgacgcgcggcgggtgttcgaggcactgcggggctggcctgcgggcgtcgccgtcattgctcttctgtgcaccacgggatcatccgacgaagtggagcaagcccttgcgagcgcgcgccacgacattcgcgcttatctcgtggaagaggtgttcgacggcttgtcggaaaagacgcaggactttctcgaagctacggctatcgtcgattcgtacaacgtcgatctggcgtgcgagcttacggggctcggacgcggagaagcgtctgctgtcatcaaagagctcatgggaaacggcttgttcgtcgggcgcacggagcgtgacggtcacggggaggcgtggtatcgatatcatcacctgttcgccgaccttctcgaagatcggattcgccagatggacagggcgagggtagaggagctctctttcagggctcgagactggctcgacgctcacgggtatcttgacagcgcggtcgaactttcatgcaggataaaagactacgggcatgcacgttccgtgattcttaggcagtgggagggctgctataccagcgattcgcatcgcatgctcaccaggtgggccgacctcatgcccgaagaggaggtgaggtctgacccccttgtatgcgcggtgctggctctgcccgttatgatggctgcggattacgggaaggcccgagagtacatccagatagcggaggcaggctgcgagcgcttgaaggcgggcgagagacgcgatctgctttccggcttgtgcatggtgcagcgcgcctatcttgccacctatcagaaccaccgcgaggagtctgcctgtttcgcatcggctgcgcttgaacggctcccgcgaagcgaggcgtacctgcgcggaacgatgaagcaggttcttgcttcgcgtcactgctacgacgaccccttcgcttcgaaacgcgatctcgaggcgatcatcgccgagcagcgggagcggggcaatgcaagccttctcggcgctctctattgcaatcttgccgtactggatgctcagctgggccttgatgacaagtcgaagtacatgtgcgagcaggcctatgccctgtttgccgaaaaagatcggttctacatgccgatgtacacgttcgcctactatgcggagatgctttgcgcttacggacgaggcgattttggggaagcgcttgcgttttacgaaaggtacgagggggccaacctcggcatcatcgtgtcgcactacgacacggaggcgctttgccttaaggcgaaggccctctatcgcctcggcatgcctcaggcgaagcaaatctttctcggcgcgtgggcctcgaacgagaatgcggtgtacatgacagttccctcgcttgcgatgatgcgcgactggtgcagcgtgttcgggttggacgagcctcctcggtgcaatcaggcgggtgcgctcgatcatgcctgcgtgtttttggctatgagagagtacgtaatgggcaatatggctgcctgcgaagaggtctgccgtatggccgatgctctgcccgagcgcaaccgcgctgccaaagttgcagctcacggcattgcggcgctcttctctttttcgacagggcatctgcatcatgctcatgcgcatatacgcgccgccgctttgcttgcaggtggcagcgggcttgtccagctgctttacgagaatgcatccgatctcaagggggcggctgatctcgccttgggggattcggatctttccgttgccgagagggccgtactcggggaagttgcgagagccgccgacgcgatctcggcatcgcaggcgcctctttcgcttaccgagcgcgaactcgaggttctcaaagagctttcgtcgggggctaccgtcgctcaagccgcagcaaacctgttcatttcgaaagacaccgcgaaaagtcatcttcaaaatgcttacggcaagcttggggtccactctaaagtccaggccatctcggtcctgcgtgaagccggcattctcggctgattctgccaaagcgctctggcggcactcgaatcaccccgaccctcacctcttcgggtgatttgcgaagtgcgctttcaatcccagaataaatgcagttcgtccccgcaggggtccgcgcaagcgggatgcggggggctttttggacgagatcgccagatgggaggctgcgattccgcctgtcttagacatgcgcacgcatgccttcttctgctcggattcgttcggaaatccttttggctcgagatgagaggaaggtaaaagatgaaggtgaaagaggcgagcatctctcggcgtagcttcgcgataggcgcaggcgcagctgtcggtgcgggcgtggccgcaacggcgctcgggtgcgcgccgtcggggggatccgataaggggtccgaaccggcgggagcggatgcgcaggtgaaaagcgccgtgtcgcatgacgacggcgagtggattccgagtacctgcaacatgtgcttcaacaactgctccatcctcgcgcacgtcgttgacggcacgttggtggagatcaccggcaaccccgacagcccgatcggcggcgggcgcatatgcgcgaagggtgcagcgggcatcatgcagctctacgatcccaaccgcattacaaagccgctcaagcggacgaaccccaacaagggcttcgacgaggatccgggttgggtcgagatcagctgggatgaagcgtacgacaccatcgtatcgacgctgcaggcggcatcggcgaccgaaggcaaatgcgtcggcggggcatctatggtggcgggtctcaacggcagcgtatggcgctcgcttgcgctcggttgcgtgtgcggtgcatccgaaggcctcctttccgacatctgcggtgcgggcatccatgtggtggaggcccttttcacctccaatggcaacgccatgcccgactacgacaacaccaactacgtgatccagttcggtacccaagcgggcactgcgacccgccatgggtttaccatgacgtgcgagcggttcgcgcagcgccgccgtgacgggctcaagcttgtaagcttcgatccgcacatgagcgcaggcgccgagcaggccgatatctggatggcccttcgtccggggtcggatgcggctgcggcgcttgcgatcgccaacgttctcgtcgagaacgacctcatcgaccgcgaattcctcgtcaagcgcacgaacgcctgcgctttggtcgaccctgatacgggccgtgtgctgcgcacgtccgatgaggcgatgaagtcgatgtattgggatcagaaagcgggggagcccaaagcgtacgacgaggcgggtgatcccgctcttgagggtacgttcgatgtcgacggcaagcggtacaagaccgcgttcgaggtttacaaggagcacatcgcgccgatgactcccgaatgggcggccgacatcacgacgctcgatgccgatgcgctgcgcaagatcgcgctcgagttcggcgaggcggcgtgcatcggacagaccacgacggtcgatggcgtcgaacttccgtatcgccctgcggcggtcgacatcttttcgggcgtctcccgccataagcatgcgattttgagcacatggagctgccttatgatcaacgtgctcataggcggctgcaattccgtgggcggcttcatcgggttcgggcccgcctgcaacggttggaccgacgacaatcctcaagcggggttccgcgctactattttcgagcccgatgggttcctcaataacacttcgctgatgctcggcgcgccgcattcgttctacgacaccatctacaacggcgactatacgccccaaggtatggggatggcggctttgcaacctctttccgaggacggtcatttcgtgcatgttgcgcaaagcgaccccgaccgctaccacacaaagcccataacgcatctgttctggtatgcgtgcaaccccatcaaatggtgggcgaacgccgacgagcaggccgaggtttacaagaagatggatttcattgcgggctgtgatttgttcttgaacgacatgagcctgttcagcgacatcatgattcccgaggcgacctatctcgagcgttgggatgtgctgccgcagtggtacatgaaccatcgcatgccgggcggcatgaccaagccgtggacgcttgccatgtggcagccggtcgtggagccgaaagacggcgttccaggattcatggacatctacggagagctttgctatcgcgcgggcgagcagtcgaacgccgctttcatcggcgcgcttgccggcatgtaccgcatcaaagaagagtacatgcccgaccttgcccagaagctcgacaaggaagtcttcatcgatgcggtgtacaagtccaacatcgacgaggagcacgggctcgattggttcaaggagaacggcggggtctatacccacgaccgtaccgtggatgaggtctacatctgggcgaacgacgctccggggcgcataccgttttactgggacttcatgctcgagatgaaggacaaggtcgaggccaaggttgccgagctcgatattccctgggagaccgacgactacattcccttgcccgaatggcgaccgggcagcgatttctacccagttgaagacgctgctttcgacatgttccccatctactacaccaacgctgccaacaccgacagctggacggtggagaacccttggctcaacgaagtcaacgaagacgacggcgtgacctactgcatcgagatgaaccctgcaaccgccaaggcgaaaggaatcgagagcggagacgaggtcgtcatcacctcgaccgccggctattcggttgagggcaaggtcgtgctcaacgagggcatccatcccgaatgcctctcgtctgtggtgggcacatgggactgcaagagcaaggccatgtcgatcgcattcggcaagggcgtgaacctcgtgagcttgctgcccggtacgaaagccgagcgcatggatcatatcgtttcagctttcgaccagctcattcgtgtcaaaatcgagaagaagtagggtgtgatttccatggcatacggaatgctcatcgatctgaaaaaatgcgtcggctgccatgcgtgctcggtggcatgcaaggaagcgcacggtacacccccgggagtgcgccgctctcatgtggagcgggagacggaaggcgtcttccccgatgtgaagcggaccatcgtgccgatgctgtgcatgcaatgcgagatcgcgccttgcgtggagaattgccctacgggcgcgagcatcaagcgcgaagacggcatcgtcatcgtggacaaggagacgtgcatcgggtgccagacgtgcattgaggcctgcccgtacggtgcgcgctactaccgcgcggacgacatggggtacttcggtgaagagctcaacgagtacgagagcgtcatgtacgtcgacatgccgaagggcaccgtcgacaaatgtgccttctgcgtcgagcgcatcgacggcacgggcgagccccaagcgtgcgtggcggcgtgtccggcgggcgcgcgcgtgttcggcgacctcgaggacatcaaggctgaagccgaggctgcgaacggctttcaactggaggcggatgtgagcaccaacccctcggtgtggtatctgcctcacgaggtgaacgcctaaacgcgtgtgattgcaggaggcgccgtgcgatgcctcctgcaggttgtgctgtggggcgttgcggttttccgctgcgggttcgccctttcccaacgcgcccggctttgccgctggcctcccttccgagcggcgggctgggcgctccctggatattcgagcaaggagaccccatgaagacggtagatctttcggtgcagagaaaccatgcgattagatcgggataccccatgctgcaccttggggccgatggcggcaagaagaagtcgttcgacgaggttcagacggaaagcgcattggatgttcttctcgatggaaggccggtgatgcggcttatatgcgatttgtccgatactgtcgctctggttgtagggcgtttgttcaccgagggattcattgggggcgtttgcgatatagcgtgcgtctacgtgaatcggcatgcgacggaggttcgcgtgacgcttgcttcgtcggcgtcgaggaggctgcggggggaggcgagggattcggagcccgtctcgatcgcgacccacggtgctctccagcgcgagttagggagccgtcttcgtcccgtgaacccgattccctggagcgcagatgacgtgttctctctcgcgcgggttttttcgagcgattcgcccatgcatcggcgcacgttcggcgcgcacagctgctatgttgcgctcggcaatcgggttcttttctgctgcgaggatctgggcaggcacaatgctttcgacaaggcgataggcagagcgctgatcgaggggattgacctcaggcgggcaacggtgttcacaagtgggcgaactcctgcggacatgacggcgaaggcgatacgcgcaggggttcccatcctcgtgtccaaggccgtgcccaccgatctcgcaatcgaacttgcacgcaaaaacgggcttaccctcatctgttccgcgcatcccgattcgatgcgggtgttcaacgatccgctcggatgtgccgaggtgcgcggatgcggcgatgggctgcgactcgaggtgcagggcgcttcgtgggaggctgctcgcgtgctcggatcgtgctccgaggaggttgcgctcggggtttgttaggggttgcttggttcggcttatcggatgggggcagttgcgggcgatatgcctttgtttatcggcaacgagtttttgcagcctgctcagcaaacggatatccgtttgccgtacggtgaatctccaagctggaagcccgagtccattgacggttatttccccgagtggcgcagcatgccatcggatacgagatcgatgagctcttgcttggtgtgtatctccagcttctggtagatcttttttatatgcgtctgtaccgttcccgttgatagatataccatgtcggctatcttcttcgcactgtttccctgcgacacgaatagcatgatctctgtttcgcgatcagtgagcccatggtcttttcctagttgttgaaccgttcttttccggacatctttttcggattcataccctggtttcccatctgcgccaaaggctttgttccgaagaaaaacgaacgatgcgatcacaatgagaaggcttccgatgatcgagaacaaccctgcgttttcatcgaaggttgcttgggtcacgcttacgaacgaagggatggcaaaatagctgagaagccatgctattacttcgggaatgagaaagagcgatcctagtaagacgacgggagaggttcgagtcgtttggacgctgccaagcagggtgatccataggaaaaaactcaaatacgagcgagcgataatgattatcgcccgtccgtaaacgctccactcggagttgagggcgctcatgaaaagcaaacctgctaggaataccacgataagcacgcccatcgagcgcgcgtgtccaatttgcgagcatcactggaatcctcggccctccagcctgcttaagggacagggctgcccgatatgcggacgggagaaacaggccgcttcgcggcggggaaccacggccgactacgctaggcgccttgtcgaagtaaatcccgatacttagtgagtatatagggagacatctccccatcgaggttgagtgcaaggtttgccatcatgtatggacgcctgaagcagggagccttctctgcggtacgggttgcccttcttgctcgaccagctcaacttcattttccgagcagcttattgtgggtgcgctttcctggggtttgggcgatgagaacgtaaggtctcgtgataccgatctaatcgggcgggagctcgatatcttggtttcagcaaaccgtatcgctttcgaatacggcgcgtggtattggcataaagaaaaggttgagaacgacagggacaaggtcgagaggtgtcttgatgttggagttcgattgatcacgatctacgacgcctatgccgtgagcagccgcttacgacccttctttgctttatcgccgatacgatcttccctctggtgggcatcaaggagaggtcttcttctgaagaatgggattcgataatcgagggcactcgcattcgcgcacgaatgaagacggcttccgatttcaaaagagagctcggggcgatttcccctgagattcaggttgtcggcagctatctcaatgattcctccccgattgaagtgtgctgcaaatcctgcggctatcagtgggcgccagcagcgggaagtcttctgcaggggcacggctgccccgcgtgtgtcggacgaaagcgcaggactcaagatgagttcgaggatgagctgagagacacgatgcccagcatcattgtccttggcgactttgtaaataccaatacgagagttgacgttaggtgctctatctgcggctgtgaatgggtccgttagctagaagcgttttaagtggcacggttgtcctgaatgcgatcgggaaagagcctcgagacgctattcgaaaggaaccgaagccttcaaggaggaattgtccgtggcggtcccacattttgaacttcttggcgaatgcagaaacacctggacgaaggtgcacgcgcggtgctcgatccatcaagtcgaattcatgtctttgcccggtacgctactgaaaggcggtggctgcccgatttatcgcaaggaaagcgttaggcgacttaacggtaagacccatgccgagcttgttgccgattttgaaaagagagggagcttcaacgtgaggctggttggagtctatgcgggaagtaagaaccctattgaagttgagtgcatgcagtgcggacgtagatggatggcaaaaccctcgcacttgtcggagggacatggatgtcgctggtgcgtgcgcaagcgatgagttgccaatatcgagcgtagcatatgcacctgtcgtaaggggcggacagtgcagccggccgatctgagccgcgacgcaatacacggctggggtcgcccctggccgtgagaccggtttccaaaatgcgcggggtagggcgagcctgagtcgcgcacgcaacggagtgtgggagtttggcgtacgatgaagcgaggtcgagttgcgtgtggggtgctgggcaaagagtcttccgtaacgactttttcttccatggttattttttgcgtataattatctgcgatgtttatgttgcaattgagggctagaagcgaatgtagtgctatgtaatgctttccaaatagacgtttcagctagaaagatgttttgtgcatatatctttcagggttgaacggtctggcaatatcgcatatcgcctttgatgcgctatttcggaagaggagggccagaatgaatttcgaaagcgccatgttccaaccatgcaaagagtggctggcgtccgaaatcacttcgggaagaacttgggatgacgttatcgcccttggccctaacgaaagcgatgccgagacgaagctcgagaattacgtcaacaccctgggctggcctgaagacctagatatgacaacatgggaacaattcgttcactactataaagatcagctgtacccgattaccgccaccgaaggggaaaaggtggtcgccatcggcggcacagccccagtgaatgcgtaccccgttccaagcggtctaacgtccgcgtggcagcaatacagcgattcgcttcagggcaatctatcgcatatgtctattgcgaacatccgtaaaggctgcatctgggtcctccaccaccttaaagaggatacgagaagcctctcccccgtgaagggtttggttacgggcggcgtccaatcaggaaaaacggcaagcatggaaggcctcgtcagcatggctgccgactacaattggaactttttcatcattctttctggaacgatcgagagcctcagaaggcaaaccagggataggtttatgggcgacctgaagaattcggaaggtggtgttctttggcgcgtcttggatttctctggcgccgacaggttgtacgccgaagaagaactccgactcaatgctctcgggggcccgaaaacctactcaacgcgatacgttaccgtgtgcctaaagaacaaaacgcggcttacgaagcttattgaatggctgtacgatgacccaaaccgcacgagcaagctccgagtgctgataatcgatgacgaggcagaccaggcgagtatcaacaccgccgagataaccctagatgaagagcaggatcggtgcgcaatcaaccagcttatcgtgaacctcgctaatggacgactcgtcgacgggaggaagcccgctgcgccaatgcagtcgataaattacatcagctacacggccaccccatacgccaacgttcttaacgaagccggcgaggaatccctttacccaaaggatttcatctgtacccttcccgaagagaaagaatacttcggcgcaaccacgatattcggaaacgacgagatcgggaaaccgggattcgacatcgtgaggacgatcccggccattgaagaagctgacctgaaggagcttcataagggcagggccctttcgcttcccgaatccatgaaaaactcgatagcatggttcctgagcgcagccgccatccttcgctgctccggccataagaaaagcatcagcatgctggttcacacgacgcaaatccagaaggagcacagggtcctctatgcggcgatcgaaggttggttaaacaagcccgcagaggtcattgctcgctgcaagctcaactacgacagtgagctgcgttccgtcactagggaagacctcctggcggccaacccagactatcccggcatcgatgaggtaagggagtacgacctcggtttcgatacgatcgaagaagagatcgcggagatcatttcatccgttagcaatatacagatggacgaagacagcaacctgacgtacacgagcggcctgcacctctgcgtggacaacagtcaggcgaacaaatacgccgaagacgggacctacctgcgtctcgtttacccttcccccgaccagctcaaaaagcttcagaaggctccagtgtttctcgtcataggagggaacaccctttcgcgcgggttaacggtcgacggcctcgtttgcacatacttcgccaggaatgtgaaccaggcggacaccctgatgcagatggcgaggtggttcggctatcgaaagggatacgagcttctgcagcgaatctggctcacccagcaaaacacgatcaaattcaaatccttggcgaagatcgacaacgacctgaaatccgaagtcgagctgttcatggaacgaggcatctcgccgtccgatttcggcccaagaatccgaaacacgccagaaatctcaaaattcctcatcacggcaaagaagaagagccagtcggcagtttacggcgactttgatttctgcggagacagctacgaaaccacgaagttcgattacagcgagatgcttcgggataatctctcccttgccgaatccttcgccgtcaagctcgagtcgagctatcccagaaagcgctcgaccgtcgcgaaggcggaagtgtggagaggcgtcgagtacagcttcatccgggaggagttcctcgacgactacgttatttctgagcacggcaccctcttcaacagcatcccgctattccgcgaatggatggacggggtgaacctcgacggcaaattccttcgctggaacgtcgcgtacatcgacggagattgcaagacggagccatgggcgcccgtttcggggatggccctcgggctgtccgagcgaacgaggataaaatcgaaaaacaacgaggagctcgactacattgacataggctcgctgagatccggacgcgacgcgatctgtgacgtcgacgaggattcgttgtcttctgagcagaaggagctgttcaagaagacgaggaagacgggcaaagacatcatctctaagagatgcgacttcaacctggccgaccgacccctgctcctggtctacgcgatcaaaaaggacgggggcgtcgcgagacaccccaaaagaacccgcatggacgcccccgtcgacatcatcggcatcagcattatcgtcccggggaacagcgtcggcgaaagccatgcgaggtcgcttcagatacagctaagcaacgattaggcgggattcggacatgctagacccttacataccggaatactcaatcacctcgattgacggcagcggcgtcctcaaagcgcttcagaacgactcgctccccgaactagatcttcttgtcagagaggcagttcagaacagtgcagatgcggcattgaagcgagatgggaacttctcgaacgtttacttcaacactgggccctttaaccctgcgactttcaacgcagagttaggtgcgatcagttccagactggatgagctctatcccagcagcgaggagtcgtaccttgagattagagacatgtacacctggggtttgaccggtcccgtcgacaaagcggagatcgctgggaacgatggcgaccacgggaactatttcaagctggtattcgaaaacggtcaggagcagaccaactcaaaccaagggcaagcaggcggcagctgggggtacggtaagagcgtttactaccgagtcggaatcggcctcgtcttgttctattcccgcattgagacggaagagggcttcgagagcaggctcgttgtttcgctcgttgagcacagcaggactggcagttcaatcctgaaaaacgttcagcgggactcgatcggcagggcgtggtggggtatcagacccgacaagtccatggagcaggtctatcccgttactgacgagtccgagaagagcgcatcttggacatctttgctctcaagcctttcaaggacgctcaaacgggtacatcgatcgtcattccgtacattgatgagaacagattattgcaggggatcttccccgatgaatgcggcgtcgcggatgagacggttcagatgtgttcctggagaagcagccttcccgaatacattgagctggccttgcagaaatggtatgctccgcgggttttcaataagtttctagataatttcccagagcacaaatggctcatggcaagagtcaatggagtgccccttacggacacgaagatgagacctttcttcttgttggtgcaggaattgtacaacgccgcgctcggtaagaactcaggggtggactattccccgacgcacttctgcaacatacaaactatggcgataccatccaggaaggttgagggaggaaccgcgggtcacctcgcgattgcgaaggtcagcatctcggacttcggaggttctgggtcggcgatctccccctacgtctatcttcggctgttctctaaaacggcgccgaatgatcccatcgtaatgttcgctagaacacctgggatgatcttgagctacagaattgacggccagtgggcaaaaggcctatctaaaccagaatctgaggacgaatacttaatcctttttttcgtgccgaaatgcgacgcccgtctcaaggaatccgtctcagacagcaaatatgcggggatggcgctgggagagtatttgaggaaatgcgagaaatccgaccatctcgactggaacgacgcgaacaaccttactgtgattgcaagcttccagaagcggattattatccagacaaatgcgttgctaaaacccgttgacagcatcgaagtcgaggggaccgccagcaagctgtctggcaagcttggccgtcgactgcttcccagctcgaagttgggccgcgaaagatccgacggcggcctgggcggcgggccaggttcgggttcctcgccgttgaacaacctatcgatgtcctttaatcgcgcagcgtaccacgccgatcgcatcgacatcgatttcaggattgacttctcgaacgcgcgaaagagcgttgaggtcgggctcttcgtcgaggacgagtcgggaaccgacctcgacccctcaaggtgggcggcaaagataggcacgcctttcccctttcgcatcaggtctatctctaaatgcatcgttaagtcaatggacactggtcaggcctacgcaattgacaccgactgctctctcgtcagctccgtagttacctgcgacttcgcacggctatcgctggctgctaaagagggtctgcctgtgggcttcttcctcgcatgcgacatcaataacgcgtccgtaactgggcgcatggaaatagaaaccagcgaaagaacgtatcgcctttcgctaaaagaggtcaaaaaaactggaggcgagcaatgagcagtatcgctttctatcctatagcagacgaggagatgctttctaattctggcgtttttgcaggcaagtacgaattctcattcgaaatggagggaacgtggcttcccttgattcaaggcgggagatcgacagtcaaactatcagacccaaaagagctgtggagcatcgagagcgacggacttcgaatctgccggcaaatcgtcatcgagtatccggggctcctcaaggggaagaacggaatagcgcccgaaggctccaaactgtcggtatgcatcgtctggaacaacaaggcattgactcagatgggctatatcacgcccaactcggtttcgatgcgcaatacatcgctgtgcttcgattttcaacacaatttcaaaccaggggagatttctggcgacctgtcgcttgaaaccgtcttctacatcgaggaggccgcgaaaaaccttctggagggcgaagagaacctcatcaatagggctggcgtgacaatcggggaaatcgactctgtggcgcttagcttcaccgacgacttcatggaattccccatcgtcgaagttaacgacaagaatgcccccctctggtggctagacatcacgcaatgggacgacccgaccaccgaccccttctcatccgattacgtttgcctttacctgaacaccgcgtacagctgctgcccgaaggcgggttcgacgacgaaagggcaagagctcctcgtagagatcatctccacatgctatctgatgcttttccaggagctgattaatcgtgactgcatcagcaacaccatcaacaacgtcgggctcgagcccggaagcatctcaaaggttctgtactacttctcggcaggctgcgaccccgcaataaggaccgaatcgatttccgagatgcagaagtcgatcaggatcaacgtcgagagaatgcttagcgaggcggataatgaactataagaagatgtctaaggaccttgcgagggaatgggtttccaaaatagataaattgcccgacggttcgtttgataaccttgtcgcccagtgggcgtcacggaaaatcgaagaccagttaaccgccgactacctcgagatacgcgaaaaggtcgttgcgtcgtacgacgagggtttgaagtcgggcaaatactcggccgacgtcgagacggggttgtgtctctatcggcttctgaacgaagaatctgggttcacgaacgtggtggcaaacgacgacgacgtttggcgttacttctcctgcgttgtgtttccagacataacgtacgacagatacccctcgcccgccgcgggcgacaaacgcctggcgtcgaagcgcttttactctcacaagcgacgcatttgggtaaaaacgctatggtggtatatccatctttcctggcagggaaatgttgaggacacgagacgcgttttggctgggctggggtccgacacaattagtgacctcatcgaaaggactgggaagggatatagactcccgctctacagggagatgatgagacgctactcgaaggccccgaacaaaagtaaccacgctttcaatcgcctttgtgcccagaacctggtgaactgcaggtccatcgaacctgctttgaccggtcgtggggaagagggatacgtggagtacctctttgttcagcttaatctgtaggggtgagaaaatgctatcggaagagctacgaaatgcttggaaatccatccctactgggcacatcaaagagatatactccttgaaggggtcagactatcccgcttgggcagtgcgccgtgaaacgacacatggcgttgcgatttcgctcccgaacgacgatctggaggtgcgcgagagtttctccggagtggacctatacgcggaaaggctcggcgcaggccccgacccatcaattcgttgtctttttctcatgacttcggcgccgattgaaagcgtcccgttcgcgacgctttgctcggagttcgtttttccaggagacaacggatctcaaagagcagagattatgtcgaaccccatcggctggtggaccgaatggaaggagcttctaggaaataaaaccgtcgacgaaagggtgtatgacaccctcggggagctgatggttctaaagtacctggcggagcatggggagaacgcggaatggaacgggccggatgctgcgacatatgacatcgactgcggaacgaaattcgttgaggtcaagtccaccaccgcgagaaacagcaggtgtataacgttgagtaacaggtttcaactcatccctccacaggggtctcacctgcatctcgtcctatgtcagttcgaaaaggcaaaagacggccactgcatcgatgaactcgtgatagtgttgggagaattagggtacaacactgccactcttaacgctagactagaaaaattaggcttagggcgagggaagtcggcccgccgcagatgctacatactgcacgggatgatcgagtacttggtcgacgattcctttcctgctataagggacagctctttcgtcggcggatctctgccggcttgcatacaaagcctttcgtacacactttcgctggatggcgtccaagggacaagcctcctggaggaatgagggacgcttgaaaacgctgaaaacaatcgacctctgcgctggcatcgggggaattcgaaggggcttcgagatgactggccgcttcatcaacgtgctctcagccgaaatcgatgagcaggcgtccaggacctacgagcacctcttcggcgatgacccgaggaacgatttgacgtcggacgagttcaagaaaaaggtcagtggcaccgattatgatacgcttttggctggctttccgtgccaggcgttcagcagggcgggaaagcaggcgggtttcctcgacgagacaagaggcacgatctttttccatatcgcggaaataatcaaaagcactaggccgcgtgccatctttctcgaaaacgttgaaaacatcgtctcccacaatggcggcgagaccatggacaccataatcaacgtccttgaagatgaccttcaatacaaagtggtcggcgtgagcgacgactctcctggaaaccacagtttcagcagggagacctttgttcgaaacacgaagaacttcggcctcccccaaaacagacccagggtctacatcatcgcattcgacaagctccgatacggcaatgcgatcaaacaccttcccagcagcattcccactgaatccagcgaagttatcttccccgacgtgtcctcggtgcttgaggacgatcccgacattcgctattacatggcgtcggggtaccttgaaacgctcaagagacaccgcgaaaggcagcgtagaaacggcaacggattcggatattgcatcgtcaaccagccaggccgaaagtcaaagatatcgaatgcggttttggctacggggggggtctggaaaggaacgcaatcttgtttatcaacctaaagaaggtgttgctggcgttcagctgtcaagccgaaaaactccgttgaacaacgagggaattcgaatgatgaccccaacggaatggggacggctccaagggttcattgattacgggttcagggatgaagatggtttagatacgttcagtttcccccctggcatgtgcgttgggcaacaatacaagcaattcggcaactcagtgtccatccccgtcatcaaggcaatggccgagttcatgtttgattgccttgagttattggaaagtaaatcagtctagttaccgtctattaccatccaaggcttcgtaacgcacttgtgacacgccgatagcctgtacccgtagttagggtgcaggcttttcttctggggtcgtgaccccacccggcgcgcgcagcgcggcgggaagaaaaccacccgctatgcgggtgcgcgtcgaaggcttcgcccttgcggggcggcggccgccagctagggttatgatgcatttgttcaggacgcatcggccttagaaaggcggccaccatggcaaatcaggctaacagcctgtcgcacacgaagtggatgtgcaagtaccacatcgtgttcacaccgaagtataggcgcaaaatcatctacaaccaatacagggattcgttgggtgcttattgcgccgtttttgctacaccgttccacgctccactgctacagcgttccatggcagactgccacgtagcaatgcgggttgctctgattgcgaggggcgcgcaagcgcccctcttggccaatacggccggttatgctcttagccgatgcgcttgcgcattgactcgtcgccttcaatatggatgacgtccgaccgatagactatgcggtcgatgacggcatctgcgattgctccttccccgagctttgaatgccagcctgctggcgagaactgcgagcaaatcaataaggacccgctgcgcaagcgcgcctcgactatctctaaaagctcgcgcgccgccttcccctcgagcttttccaaaagccaatcgtccagtatcagcaagtcgcatttcgtgtagcgcttcttcgccttgagccaatcctcgttcttgctcacgttcagctcgtcgagcatttcgggcaaccggacgtaccttacgctgaagaaggcgttgcaggccgccaccccgagcgcgcaggcaatccagctcttgccggcgcccgacgcgcccgtgatcacgacgttgcggtggcctcttatccatgtgcagttggacagctctatcagtttcgtgcggtcgagcttgcgatccgcgtcgtagcggacatcggcaatgttcgcctcgggatcggagaagccggcctggcgcaacagcctcgtcctcctgttgatgcggcgcgcgtcccattcggcatcgactatcatggcgaacctctcgtcgaaggtcatctctgccactccttgcgattcctcctggtcgcgatacgcttgcgccatcaccgacatcctcatgccatagagtttgtccatcgtcgtctggctcgccgtcattattcatcgtccccctcgctcaagttccggtagtagtcgcctccgcgcagatacgctccggcgttttggtcctcgggccctgcggcccccatctccgagataatcgatttgatcgtcttgtagctcggcctgggcgttagagagcaggccttggcgcacgcctgctcgagcatctcccttccgtgcttcttcgcgagcgccagcaccgcgcggcacgagcggtaggactgctgctcgatcttgcgcgacctcaagatggcatcgacggcttccccgcaggacgggccgatcccggccgcccatttacggaagcgcttcgcgtcccactccacaaagtcgcgatgggaatcgggcatgtggtcggggttggtgcggtagcttcccctagggccgtagatgcgctcgtgcatggcgattcgctcgccgtcgcaggccacccaaacagcggatctggtggcgcatagctccacctcgcgcttgacgtagctgaacggaaccgagtaccagcatccgtcaaacgagacgtggtagttaaaattaacagtgacaaccttgcgggtaaccatctcgtagggcttgcccggcagcgggatgagcagcggcttctcttggcggacgaagacctcatccctgctgccctcgcgcttctggaacggacgggcgttgatctcgcgcaccttctccaaaagagcctcgttcagctgccggagagaggtgaacagctggttgcgaaggggcgcgatggcgcgctgctcgatgaccctcacgctcatctccaccgcccccttgtccctcggcctcctggggcgcgcgggcacgacggcgcacccgtagtactcggccatcctgcggtactgctcgttgatcacgagctcttcgacggtgttcttgacgacgccctgcttgaggttgtcgggaaccactatcggcacgctgccgccgaagaaggcgaaggcgtggacgtgggcctcgacccaggactccgctctcatgttgtaggcgccctcggcgaacatctcgcccgaatagggcaagcacgccacgaagacgtagactttgcgcgcctcgccggtgtcggcgtcgagcacctccatggtgtcgccgacgtagtcgacctgcatctcctgggcgggtttgcgctcgatgcgcatggagaccttgttggcggccgcccaggcgcggtgcttctggcagaaggcggagtacaggtagggttccatgcccgatgccagggcgtcctcgcagtactccctccaaagcgtcagcatggtcatgccgggacggttcatctccttgtcgatgcggggatggtcgatctccgccttcgacatatcggatcgctcctttgccggatagatgacggctcgaatcgccgcatcgttcatctcctccggcaagggccactcgaggccgtgcgccttcgcgcgggtggtcaccgcccttaccgttgcggtggagcacctgcacgagaacgctgtgttcctgacactcacccccatcgccctttgccgaagtatttctctgtacttgaccattttttcttcctttctcgcaatggtccgatgggcacttttgtgcccatcggaattgtggcggaaaaggaagcgcccctttcggggcgcgtggcaatttagattgttagggtgtggcagtctgccatggagcgctgtagcagtggagcgtggaacggtgtagcaaaagcgctgcaatagtcagttgggcgagatattccagcaactctgcaagtacaagggagttgagatgatcgaagggcatctgatgccggatcacgtcctcatgctggtcagcataccgcccaagctgagcgtgtcgagcttcacggggcgcctcaagggcaagagcgcgctgatgatgttcgacaaacacgccaacctgaagtacaagttcggcaaccgccacttctggtccgaaggctactacgtgacgaccgtcgggttgaacgaggccacgatcgccaagtacatcagggagcaggaagcccacgacatcgcgctggacaagctcagcgtcaaggagtacgaggaccccttcaagaacaagtagggtcgcggaacccctttcaggggtagccgggtaatacgaaagccgcttcaagcggcggcgacgagtcaaaggcggtgcgccctgaacgaagagaagggcagcgccttgagacgctgcccggcaccccttggccttataggccctgagcaaaccacccttttgaagggtggttcatgattatcggtgatggctttggcgagcagaatccatggaaaaattcatggacaaattatcccgaacgagcatttttgagtgtgagaaaaggttccgtctataatagacgaaacctttatttgaactgcggaaatgttagttttcgctacgaagtgtcgcaaaacgttttatgccgcgacctattcccactcagtgactaatccagtacgggtgctgccaatctgtgtcggactatgccgccgaaaggttgattcgtgcgcaatttgggcgaatcagccccttgattcgcggttttgggaatgactcaattgattcgcgaaaccgcaggtcgctcctttaatcactccctggtttccgccgggattcgtagcgggtggcttgaaaaggtgtgattcggggacgcacctaaatgcgtcttgaaacaatatcgggcatcctcgaccttggcggcccttttggtcgttgctgcgatggattcggacttctgagtgcgcgctcgtagggaggcgcggtggccagggcggcacttgcgttcgcgatagtttctccccttgtgaatttgccatgctacaatacagtaaaacatgtagcatgaaaggatgggatggcaaaacgaaaggaatcaaggaaatagctgcggcgaacggtggcttcctgactgcgtcaatggccggggagaacggtgtccgtagccgcgatctcgcagatgcggtgaagcgcaacgatctcgtcagggtcgaacgaggcttgtactgcacgccagacacctgggaggacgagtacgtggtagcgcagcaccgcttcacgcgcggcgtgttctcgcacgacgctgcgctctacctacttgggctttgcgactccgcgcccgagtcactcacgatgagcttcccgagggggtacaacccgtcctctgcgaaaagggagggcatcgtggcgaagtcgtcgccggaggggctgcacgacctcgggctctccgagctcacgacgccgtacggcaacgcggtgcgggcctattgcgccgaacgaaccctgtgcgacatgttgcgcggcacgtcgtcgcccgacctgcagctgctctccccggcgttccgatcgtacttttcgtccaaagcacgcgacctgccgaagctgcagtcgttcgccgacaagctcggtgtggccgcgaaggtgagaaaatacatggaggtgctgctttgaaaaccaggaacgccatgcagctcaaggcgctcatcaacaacagggcgaaggcggcgggcgtgtcgccccagctgatgctgcagaactacatgctcgaacggctgatcgaccgaatctccagatcatcttggcgcgattgtatcatcgtgaagggcggcatgctcatcgggtctctcatcggcgtggacaggcgcaccacgaaggacctcgacaccactgtgaggggcttcaccctaacccattcgaaggccgccgaggtgtttggcgagatctgcgcgatagacgcagaagacgacctttccttcgagatgctgcgcacggacgatatccgcgaggcggacgagtatccgggcatccgggtgttcctgcgcgcttgctacgatccgttggccgtcccgctcacggtcgatgtgacaaccggagacaagatcacgcccagtgccatcgcgtacgagtacccgttcgtgttcgacgagggctctgcgacggtcatggcctacccgctggaaaccgttatggccgagaagatcgaaaccgtcctggcgaggaacgtcgcgaccacgcgcatccgcgacttttacgatatctacgagctctggcgcgttcggggccatgcggtccatactcgcaccctcgcccaggcccttgcggcgacatgcgaaaagcgcaacagttgggaggcggtcgagcgtcgcggggaaatcatcgatggcatgagggcggatgcgggccttcgccggcaatggcggacgtatgcgtcgaaacactcttacgccgcaagcttgtctttcgaggaaacgctcgatgccgttcgggaagtcatggaatccataacgccttttctgtaatcgctgaggactgctcacctgttcaggaggcaatcgccgatcgaatggaagaaaaagctcaaagggagtattcagctcagcttatgaaggccgggagccctgcgagacctaatgcgaagccagttcacccggcctccttttttgattatcgaacgcatgctacagttgccgcgtgcataatattcgagtatcgcagcagaatcggactcctggcattgggggctctggggctctgccgtgtagggacatgaagaaccgccatgcgacatgcacttgttgaccgccggtatatccggcgcagatggcctttccgctgaagcaagtgagccccggcgacttgcatcagcggtcgtaccggggctaaccagtgcacatagtagcatgttttgcgtttgcgaagatttggtggtgggtacccagcggttcgtctagcacgccgcgaaagtgaaaacaccttttgattggctgcagcaaacggatgattctagcttttcggggaggaatagctagtaattctcagtaactaaatctcagcgcttatctgcaaagcaaattattcggctggtggcaacgtcgggaataagtggcaatatccaatgtggagcctttgctgggttttggcgcgacaaaaaactccgatattgttcagtcgtcattgggaagataccagccatgctctctcttcggcagatgccacgttcggttcttctcgagtttttggagcgtcttgttgtgcttcttgtaaagacgattcgatttccggctgtcatcccaatttagggcatccagctttttaaccaaagcatcgtctttcttgctcagcttgctgtatttgcggtcttttcgtttgtcgcttccgaatagcataactggccccttacattaacgatttgctgctttacggcatttgtcgttgcaatattgcttatctggacgtgacttcataaacggctttccgcaatgcttgcagaaagcatgttgggttttcgtcatgtacacggtgaaggcataccacagccaccgtattttctcaagttgaatcggcctaaattggtggccaacccagtcatgatgaatagatcgtgtatgaatgcttatcaaggattccaacatggctctgcatagcatgcgagcgaattcgtcggccttatcctttggcaaatcggacaagcccaaccttactgttggcttcgagaaagccccctcatcttcgagtctcaattcacactccgtgggattgatccagatacacacatcgaggccgggcatgctgtcgtaagccgtctccttgcggtcttgctccgttcggtcaaagatgcctatttccggggttgggaaaggacgccatattttggaaactattcccggagggtcaaaattcttcgagctccatattctcttggggaaatcattgcttaaagtcaatttcgcataatcgacgggaagcccgttcggaaacctgaaattcgcatctaccagaacctcgtattcccctcgttcgttcgcgcggacgcatctctcaaaattgaacgcaacgagcttcttctcgtcaagaaccctccagttgccgctatccatggcacttttaatgttgagtgctagattcaccaaagctgatgccgccagccacatatctaaaggctctttacgaataccattctcaaaatacattgtgccaaacagtggcccatgctttttagcgaacttctcacaggcatactgattcaattcggacagctcagcaagttcgttgtcgaattggttctctaggaaatcgctgctgtcgaactcattgagcgattgattcacggattcaatacttctgtctggcgagaacacgagattgttctcgctgtcgagcccgatgaaccgatgtgaactaatttcacttgttttcggattaaacatgacccccgatggaacgaaatcgctttcccatatatggctggggtctggaatgcggttaggtttgccggacacaacacccatgaacgcctcctcccgacgatggcttattcgctgatggagaagcacgctcttcggtttgctaagtttgttgttttaagttccttctaaggcaattcacaggaaaagcaaggaagggtcgctttcagggtatcacgctgacctgcggatacataggacaattagagacgtaaaggtgaacggcgccgttcacggcaacttcgaaaagaaaggccgtgaacatcatgtccaaagaaacaaataagaacatcaagatcatcatcccgtcctcgctcgacgacgaaggcgcacgcatgctcgtcatcccgctgctgcgcgagcctgtactcatgcaagacgtgtaccagcctgatcaggtaatgaaattgctgcgaatcagcaagccgcgcttctacgaactcaccgatcttaaacagcgcaacccgctgcccacacacaactacggcccgggcaagcgcggcacgatcatcttgcgcgaggaactcgtcgaatggatcgcatccctgccaaagggcatcggaaacggcaagcccggggagctgcccgaagattaactttcatccgcaaaacctcacaaaacccgaacgacggcccgccgcgccatcacggcgtcccttactgcttcaatgcgtcccagcgatatcgcccgatggccaagcggccgcaacggcggccaaccagaacgaaaggaaatcaatgaagagcaagaacgccgaacggctgcagcaggcgaggcgttcgggtgcggcggaaccttcgggccccatgccgcccctgtacaccgtgaccgaggtcgcggactacctgcacgtgagccgctcgacagtgtaccgcctcatcgaggacgggagcttgcgcggcacccgcatcgggcaggcgctgcgcttcaccccggacaacatccgcgagctcatcgcactcggctccgtcgaccggggcgcctaacgcatgggtgcagcccacggcattgaaggctcgttcgtcgtcgtccacgaattcatggcgaaaggcctgggcttgaagggcaacgacctcatcgtctacgcgaggatcttcggcttcgccaacgccgggaagccctacttcgagagcaaggcaggctcggccggcttctgcggcatcagcaagcgagcggcgttctccgtcgtctcgcggctgaaggcgcgcgggctcatcgaggaggtcgagccgtgcgacgaggcgaagagaataggcagccggtgctatgtcccggcgaaagagcccctctccgccctcggcatcaccttcgcgaccgatgaagaagctgcaaatgcgccaggcgacgccgatgaagaacctgcactaccgccttctgcaaccagtgaaggtccttcacccccaagggcacctcgcgatgaagaaccttcatcggggcccctgcagaagctgcacccgataccaaagacagacaacagttatttcgaatagagagaagagacgatatggacgaggaaaacgctttcaggctctacacgaaggaagaggccgatgcgaggggcataggctacgaccctcaagttgaaatccgctgcccgcactgcggcgagccgtacgagcagcaaggcttcatcggacgcgcaggccgaatcgcctgggtcacccacagggaatgccaatgcgagggcgctgtcgccgagcgcgaacgggcccgacaggcagaagcggaggcgaagcggctggagtcacagcgccgactcaagcgctgcgggatcccgcgacgctacatgtccgcccagatcagtgtgccggaggcggcaaggtacgtcgtcgggttcggcggcgccggggacagggggctctacatcgtcggcggcgtggggacgggaaagacctacgaggcatgcgcgctcgcgaagtcgttcttcgaggcgggctacaccgtgcgcgtgacgacgtcgctcgcaatgctcgactcggtgagccgaagctacgacgacccgtcgatagccggcatctccgttttcaccggggtcgacgtcctcgtggtcgacgacctcggcaaggagaacgccaacgcgtgggcgctcacgacgctgttccagatcatcaactctcgctacgaggacggcaagccgaccatctacacgtcgcagtacgacctgcaatcgctccagcgccgcatgtcgcgccagcgcgaatccgagagcgccgaggccatcgtgtcccgcatctgcgagacaagcgcgatcgtccagctcggcgggaaggaccgccgccgcagcgcaaaggcgaaataagccttcacccgcaatacccgagcgaaccctaaagcggccttctcgctgacaaagcaaaggcaataggcgttatctgggcgagcgggcggggtcggctgggccaaaccaaccaccagaagagccggacccttgccccgcccgcgcaaccaagtcccaccgcgagagaaaggcaggcagatgggcaccatgattcagaacgcagaaccaaggtcaaagcccctcgacgaggagacatgcgggcagctcatctcgaaatgccaggagaacggctggctccgggtcggcggctacgactggcaggacgacccgtttctcgaggaatacccctacgagttcatgcgcatcgacgatatcgacgcgcttcgcgagcacttcgggcgcggcaactgggcgatccgccagggcgtggtgttcggcgacctggcattcatcaaccaagcgaacggcggcgacgagtggtggaccctcaagcgcgacggcgaggaatgggtggctttcgagtcgacgagcttcgcctacgtcatcgaggcgaagggccgcgccgcgttcgagacgctcgtgcgctcgatgcagctcgcaacgccggcgcaatgcaagaccctcgactactacgacgaggacgcgtcggcaaaatgggccgcggagcacaatccgcgcatccccgagctcgagcgttctctagcgcagcgcgcctcggacgcccgcgaagccgcatccgcccgaaacggccgcagccatgcgccgagccgcgaggcccaggccatcgactaacgaaaacaaccagcaaaccaaccgctgggacagcctgtcccagcgaggaatccagagaaaggagccaacccatggcaacggatttcggagacgagagcggcgagaagctgttcgactggatgctcagggtcggccaagaagccggccaggaggccctcgccaaaagcgccaagggcctggccgaggccatcaggagcacgtgcgccagcatcgggaagggcgaaggatcgggagacgtcgccgcgaagaccgccgaatgggcgaagctcagcatgcgcgagttcgagggccttcccgaatacgaaaccctggccgacatgatttcctcgcagctcaagaaagagggcgtagagcacgccttcgcgaacgagggcggaaagcgcttcctcgtgttcaaggcgaacgaggcgccgtcggtggcccaggcgttcaggcggatcgaggaatccatccctgaggcgtgcgagcgcgcgaagggcgccttggccaagggcgagcccctcaaggagcgcgccgcgagggcgcgcgccgccgccgagcagatcgcccaaaaggccggcaagccccgcgagatcgagattgcccaagcgagggcgaaataatggacgccgcgctcgcagctgcgatagcggcaacgcctgcggcagccgccaccgcgaacctctacgccgccaacctcgcatcgcttcccggagcgcccatcgagaacctggcggaagcggcggcgaccctgccctcgtaccttttggccgggggcggcctctccgcagaccccatcgccctctgcgccgcggccttgggcgcctgcgcggtgtgggtcgcctacgccaaccacctcatgggcagcgccggcacgcgcaagggcgaggagcatggaagctcgcgttgggcgaccaaagccgagatgcgcgcgttcgccgacgccaaggaccccgacaacaacatcatcctgacgcagaactgcgccctcgccctcgtgccgaggaggttcgaccagaagacggaccgcaacaagaacgtcatggtggtcggcggctcggggtcgggcaagacccgctattttgtcaagccgaacctccttcagatgaactgcagctacttcgtcaccgacccgaaggccacgctcgcggccgagctgcgcggggccttggaatccgcgggataccgggtcgtcgagttcagcaccatcgacatgaatagctcggcgcactacaacccgattgcgtacgtgaaaaacgaggccgacgtgctcaccttcgtggaatgcctgataaggaacacctcgggcgacggcgagcactccggcgatcccttctgggaggaagccgagcggcttctgtacgtcgcactcgtctcctacctggtgttccattgcccagaggcggaccgcaacgtgccgggcctgctcacccttttgggcttggccgaggcgcgcgaggaggacgaggacttcaaaagcccgctcgacatcgtcttcgaggagctcgaacgcggggcgcgcttcacccaagtcggcgcccgtaatgcgttcgacgcggagagccgcggcttcgacgacgccgccggcgcttggcgctgggtcggggtcgcgaaccccattagtgcggaagaagacttcgcgctgtccaactacaaggctttcaagacggccgcaggcaagaccctcaagagcatcatcatctcatgcaacgtgcggctgaagccgctgtcggtcaaggaagtgtccgcgctgctgagccgcgacgagatgagcctcgggtccatgggagacgccgggcagaagacatgcgtcttcgcatccatgagcgacaccaacccgaccttcaacttcctgttcacgctgctcatgtggcagacggtcgacgtcctctgcaacaccgcgcttgagcgccacggcggaagcctgccgacccatgtgcacttcgtcttcgacgagttcgcgaacatcggcgagctcccgaacttcgagcagacgatatcgaccgtgcgcagcaggaacatctcatgctcggtgatagtccagtcgttcgcgcagctcgagaagcgctaccgcgagggcgccgagataatcaaggacaactgcgacacgacgctgttcctcggcggcaaggcggtgaagaccaacaaggagatctccgaggcgatcggcaaggagaccgtttcggccatgacggtgaacgactcgcgcggccagggctcgtccacaacgcgcaaccggcagatcatcgagcgcgacctcatgcaggcaagcgaggtcggccgcctgccaagggacgaggcgatcgtgctcatcgcaggcgccagccccatccgcgacaagaagtacaggctcgaagggcacccgcgctactggatgctggcgaaaggcaggtgacgatgcccggagaaggcaaaagcagcagggccggccccgaaggccgaaccgggaacgcgagcttccaccctcgcggcccggaccccactgcctcatgcaaaggagcgatcccgctccgaacgaagattctaccaggcgccgcccgccttccacaaccggcgcggcgcccaacatgcaaaggagcaagaaaccatgctatcccagatcatcagcctggtatcgggctgcgtaacgttcctcggcggctttctggtcgtatggggcgcggtctcgctcggcctcgccatccgcgagcagcagggcggcagccagatcgcgagcgcgatctccaccatcgccggcggcgccatcatcatcgcggcagccgtctacttcggcatgctcgacaccagctggctccccgcctaggccgggggcgaagagcatgtcgcttcaaattcccatccaaaaagacatcggcgagtacgacgagaagatcgtcggaaagctcaccctaaggacgctttgctgcctggcactcggcttctccgccgcggtggcggttgccgcggtcctccacttgggactcaaggtcgacgtctcggccatgacgctcccgatcatggcggcggccctgccgttctggctcgcggggttctgcaagccctacggcctacccttcgagaagttcgtcccgctgctggcgtcccatgccctgaacagtcagtcactcacgtatcgcagctgcgcggcaatcgagaaggccgctctcatgcctgagagaaagccgcgcaagaggacgcgccgcgaaaaacgcgcgttcaggaagaaaggaagtgaaaactatgagccgacaaagcaagcagcgcagctccaagcgcgaggatagcaccaataatgtgcgcgtacagggcgcggcgtcgcgcctgctcgccgcgctggccagcaggaggtcgaaggaaaaggaccccagccgcgacgaggcccgcgcccgcagcagcaaaaagcgctgctcaagcgcagacacggcgagctacatcgcctacgacgcgctgtacaaagacggcatcgccgaggtcgagcccggcctattcagccagaccgtcgaattctccgacatcagctaccagtccgcccgaaaggaaacccaagagcaaatcttcaccacgctgagctcgctctacaactactttccggcggaatcgagcgtgcagctgaccatcgtgaacaccccgatcccgcgagagctcatcgggaagaaggtgttcttcgagccgaacgacgagcgcaccctgggctacgtcgacgagtacaaccggatcctcaacgacaagatgcgcgagggcgtgtcgaacctcgtccgcaggcgcttcctcacgtactcggtgcctgccgagagcgtggaggccgccgtgcccaagctctcgcacatcaggtcggacatcgcgtcgaccttggcacgcatccgctgcgatgcggtgccgcttggcggccaggaaaggctcgaagcgatctcgacgctcgttcgcccggggcacacgccgtcgtgcgactgggacaagctgtcccagcacccgcggttgcgaacgaaggatctcatcgcgccgaacctcatggacttcgctccctccgggcgtgccgacgccgtcgagatagacggcatgtacgcgagcgtgctcacgctgtgcgatttcggaagcgtgctcgaagaccactaccttgcttcgatcatcgacctgcccataccgctagccgtgtcggtgcacatcgcgccgattgtgcagtcggaggcgatcgcgctcgtcaagcgccagatcgactggatggacaaggagataatcgacgagcagacgacggcggcgaagaagggcttcagccaatcgatcctcacgcccgagatccgctacgcaaaagaggaggccgaagagctcctcgacttccttcgcaacaagaacgagcacctcttcgagtacacggggctcatctacacctacgccgactcgttcgaggcccttgaccgacaggtcgcgcaggtgacgtctatcgcacagggcaactccatcgccgtggcgagtctcgatttccgccagcgccccgcgctcaactcggtccttccgctcgggcgaaaccaccttgagttcacgcgctacctgaccacggggcaggtagccatgcagatgccgttcgcctcgctcgagctgaaccaggaaggcggcggctactgcgggcagtcgaagcagtccggcaaccttgtcgtctgcaacaggaagctcctggcatccccgatggggttcgtctgcggcaagccgggctcgggcaaatcgttcagcgtcaagcgagagataaccaacaccgtgcttgcttatcccgaggaccagatcgtcgtgttcgacccggccggcgagtacccgaccctcatcgaggcgctcggcggatcgaacatcgcgttctccccggattcgcccacgcgcttgagcccgttcgaccgctcggacgtcgccaacatggccacgaccagccagatggcgttcaagatcgatgccttcctggccctttcgtcggcgatgatggcagagggcgacgagggtttgccggaggcggacaagtcgatcatcacgcgctgcgtcgaagcggcctacgcgaagcgcggcggcgacggcaccccgacgctttccgacttctatgaaatattgaaagcccagcctgagcgggaatcccgcgacatcgcgcttcgctacgagcgctatgtgagcggccctctctcgtttttcaactgccagagcaacgtcaccttcgacgagcgcatcgtcaacgtcgacctccacgagctgtcgagcagcatgcgcgtgttcggcatgctcaccgcgctggaggccgtgcgaaaccgcatgtacgcgaactacgaacgcggcgtgactacgtggctctacatcgacgaggtgcagtccctcttcgggcatcccgcgatcatcgagtacttcacgaagttctgggcggagggccgcaagttcaacctcattgcaaccggcatcacccagaactcgacctacatgctggcgcacgaggacgcgcgcaacatggtgctgaactcagatttcgtgctgctgcacaagcagtccgcgctcgacaggaagagctgggtcgacctgctgtcgctttccgccacagaggcgggctacatcgacgacaccatcaaggccggcgaagggctgctcgtggccggaggggtgcgggtccccatccgcgacgacttcccgaagggcgagctctacgacctgttcaacacgaaagccaccgagatcgccgagctgaagcgcaagcagcgccgcgagggagccggccgatgagcgccggcatccgcgaggtggtcacgtcggaaaaggccgacctgctgaacaccggcacggtgaaggacgcggaggggcaatccgcctcgaccttggcgcaaagggaaagcgccgccacgcaacggcgggcgtcgatgcggcctgatccgggctgtgccaagcccgccgagggcccacgcggcaagtccaaatgcggcaaggaaccattcaacgcagatcggcgtgccatggacgtcgcccgaaagcccaccaagctcgaacgggcgaaggccgaggcgaaaacggccgcgatatcggtgctcgtcggagaattggacgattcagacgagctttccggcacgcagcgcgcatacgacgcggcgcgcgcgggaaagaggatcgcggcgcgcgcgaaagcccgaaagagcttagagcaagagggcggcaagtcgaacggcgccgcgattcgaggccgcatgccgggcgcgaagacaggcaacgccgcgcccgcgggggcttcggcgcagggcgcgcccgctgcgatcgcggcccggcccgacgcccaaatccggcttgccgcaggagctgcgaagtcctcgaccgcagccaccggcgctgccggcgccacaacggccgcgccagtggctgggatcgtcgccggaatactcatgttcgtcgtggcgatgctcgccgtcagccagatcgccggcgcgctcttcgggttctgggacaacgagtcgaagaagcagagcctcgccggcctgccgccctacatcacctatgagatggtcgaggcggcgcttgaggcgcaagaggactacgggcaccctgccggatgcacgatagcccagatcatcgtcgaatcggggcaaggcgaccacatgagcaggctcgccacgcgcgaccacaacctgttcgggatgaaatgggccccttcgttcgccgcggcgcccgaagtcgccggcaaggcgaactgggtcaccggcgaggaggtcgacggggcgcacgtgaccataaccgactcattcacggtgttcagatcggacgcggattgcatcaagttcaggagccgcgtgttcctggcgagctcgacatattcgggaaacgccctgatcagggaagccgtatcggaacggtcctccgacaagatggcggaaggcctgaaagacgccggctgggcgaccgactcggcatacgtcgagaagctcaaggccgtgatggaccaatacgggctgcgcgctttcgacgccatggcgcccggggatttggccaacccctccgccggaggcgcctccgtcgtcgcggctgcgttctcgcagctcggcgtgccctacgtatggggcggcaccacgccgggcgtgggcctcgactgctcgggcctcacgcaatggtgctatcgccaggccgggatatcgataccccgcaattccgaagaccaggcggccgcaggaacaaagatcccgctttcgatggcggagccgggagatgtgctctggcggcccgggcacgtggccatctacataggagacgactcctacatccacgagccccagacgggcgacgtgtgcaaggtgtcgcagggaatcagctacttcacctgcgctgtcaggttcaaataaggaggatggagacatgaacggaaaaacaaagatcgtggccgccgtggtggcgggcgccgtcgccttgacgatcggcgcaggcgccgcccgctgctcgatggacacgcccgacgcccaaaacgggcagcaggcaccgcaagagcaggcgtcgggaaagcaagatgacgcgaaggcgagccaatcttctcagcaggcgcccgatgagcggcagccaagcgaaagcgagttctcgtcgctggcgaacacctcatggacgagccgcgacggggcctcgaagctctcgatcaccaaggacgcgctcatcgaacgcacagccgactctgcaagcgtgatctactacacggtgagcgacgagaagaccgacgctgcgggcctgagcgtgacgctgagagcctccgaagatatcgccgtgccgggcgctgatacggtcgtgcgcatcgagaacgagggcgcatcgacgacgctgacgtgcgatttgctcaaagctacctatgtccaggacgggaagacgcaaaccgcgctgtcgatagctggcgacgtgcaagatctctgcgcgctcaccggcaagaacgaagccgacttcgagtcggtcctcgaatccttcgcgaaggcgcattcgccttacgcaacgtcggctgcatgggacaaagaggcctggatcgactacggcgcgcacagtgctttaaccacgttcacgctcgacgacaccgcttcgaccatcgtgacggtgagcgtgtcccaagacggggccatggaggcggtgtagccatgggcgcgcacgtcgaaaggaaggccatccgaaaagcgggcatcttcgccgcgatctcgttcgctgtctgctacgcggtgttcgtgccgacgcagcccgcatgggcgggcatcgccgaggacatcaacggctggctgtgcgacatgctgcggggcgtgtgcaactgggtgttcgcggcgcaagtggacgtcttgaagtccatcggctacgacgggatcctcggcgccggcttccagaacatgctcggcacgtccggcgacgtatcggtgtacgacgtggtgcgcggcatatggtcggtagccgtgctgccgatcggctgcggagtgctctccctcgtgttcaccatcaagctcatccagatatcccagcgcatggacggcagcgccagcatgcccggcgtcaaggaggtggtcttcctcctcgtattcttcgcggtgttcctcttcctcatacagaacagcttcgacctcatgacagcgctttacgaggtggtcgggctcgcgatacgcagggcggcggacctcttcggcaccggcagcccgatggaccttgcgaaggtctcgatcgtgaccaccgacgatgacgtcgccgcccttgtggcgatgctcgtggtctcccttattagctggctcgtggtgctcgtcgcctacatagtgagcctcgtcgtctgctgggcgcgtgcgatacagctctacgtgctggcgatgctcgcgccgattcccctctcgctcatggcgctcgacgagacgcgccaggtgggcgtcggatacatcaagaacttcgtctcggtgtgccttgcgggccttgtgatactcgtgctgctcatagcgttccccctcgtcttgggcggcctggtggcagcaaaccccggaaccggcacgccgatcgatgggatagccaacgggctcacctacgcgctgcagtacctggccatgtgcgtcctgctggtgctctcgctcgcgaagagcggctcgtgggcaagggacgccatgagcggcttctagcgaaaccggacagaccgaaaggaggtggtcgcgatgggatgacctgcgccaggcggccgcggcgctaaaagcggccgcgcaatgcgaggcccttccacacccggccttgcgctcaaacccaagaacatgcaaaggagacaagcaatgagcgaagacaagaagaacgtctacgtcacgctccataaggacttcgtgcgcaccgacatcgagtacgccgaccgcgccacgggcgagacgaggacgttcaactcggtgacgctgcccaaagggacagtcatcgacggaaccgacgtgggctactaccagttcagccctcttttcgtgaacccctcgcgcttcaagggggaagactaccgagacatccctctgctcgcaaaccgcgaggtgcgcctctcgaagaccctgctcgacgaccgaggaaaacccgtgacgggcgaagacggcaagcccgtgcgggacgtcgtctacgcgatgccggcgcagatcaagggcgccctcgacgaggcgcgaagccgctacctgcaggcgcaggcaaagacgcgcgacgagcgcaccttggcgcagcgcgcgagcgacgcccgaagcggagcatcggcgctcgccaacgagcatgcccctttcgactcccatgaccgctaggaggtgcatcatggatgaaagcaaggaagcggtctggggcgcgagccccgaagaggtgcgcgcgaagctcgtgcgctgcctgctcgccctgctgctcgcagcgtcgagcgttgctggcgcgctatcatcgctcggcgcgaaggaggcgcacgcgacggaaaccgcctacctgagcgtgggcggcaacatcccctacgcggggttcttcaccacgtggatgtgggcagacggccagatggcctactgcgcccagccctccaaggcgacgccttccgagggcggctacgagaaggcgcctttgagcactccgtccggccgcgacgccgaagccgccgccgacctgtggttcggatggggcggtccgggcttcgactactccatgtggcccggcgcctggtatgacggcaccccgatgaacgacgcgcgctacgcggcgctcacgcacatcatcctgtccgacacgttcagctcgagcggcgaccaggccatgcatgggtgcacccaggcgtttcgctcgtggtgccagcagaacgtgctcggcttcgacgacagcggctcggtgatcaatggcgacgccacgggacgcctcatgtactcgcgcatgggcgaggtcaagcagtccttcaaggcgttccagctctacacgggaagcttctcgcagatgatcgtctcgttcagctacacgccctacggcagcgtcgagcttgagaagcagtcgggcaacgatgccatgagcggcggcaacgacgcgtactcccttgcggccgagtacacgctctattcggacgaggcctgcacgcaggcggtgtccgtgatggctcttgacgactccggctgcggcaggatcgacgaggtggagcccggcgactactggctcaaggagtcgaaggccgcacccgggttcgccatcgacgaggccgcctacgcggtgacggtcgagcccgacaaggccgccaccgttgcggccgggcatgttcaggacacgccgcagtcgaacgccgtcgacgtcgtcgtggccaaggcggatgccaccactgaaaaggcccagccccagggcgattccgctctcagcggcgctgagttcaccgtcgagtactacaagggaatctactcatcggtcgacgaggcccgcgcatcgggctcgcctgagcgcacctgggtccttgcgaccgacgatgagggcaaggcccacctgaacagcgattctaaggtgtccggcgatgcgttctactacgcatccgacgggacgacgcccgtcatcccgctcggcaccgtccttgtgaccgagacgaaggcgccttgtggctacaacctcgacgacggccgaggcaacgcgcccgaaacgcatctcgcgaaggtggagtcggacaacgaccgcatcgaagtcgtctcgacctacaactcgcctgtggcgaaggataccgtgaagcgcggcgactaccgcctcgtcaaggaggtgccggtatccatctactccgagggcgcaggcgacatgccgcaggacgtcaagcgagtgctcgtccccggcgtcgagtttcagctgatcaatgattcggcgaacccgatcgcatcccccgagaccggcgaggaggtcgcgcccggcggcgtcgtgtgcaccataacgaccgacgggaacgggctcgccacgaccaaagacagcaacgcagaggtgaacggttgggcgaagcctgagggctggagcgcagcgctcgcgtacggcacctattccgtgcacgaggtgatccccgtcgatgtcgccgcgaagttcaaggcggaatacggcaagacccttcttcccgtcgatgatttcaagatcacgatttccgacgaaggacagtacaatccgccggttctggtgagcaacaagatcccgcaaacgccgctcaaggtggtcaaggccgacgccgaaaccggcaagcggatcccgcttgcggcgagcttcgagctgtatgacgccgacggcgatctcgtcacctataccctccactacccggacgaggaggtcgtgagcacgtggaccaccaacgagcgcggcgagctcaccttgccgatggttttgggggaggggcgttactttttgaaggaggtcgcagcgcccgagggctacgtcctcgattccgagccggcagccttcacggtttccgcggactatcgcggatgggacgatccgatcgtcctgaccttcgaggacgcgccccagaaaggcaccgtgaccgtttcgaagaccgactccgagacggggttgcccgtcgacggctccacctacatcgtgaaggccgaaggcgacgtctccacctccgacgggaccctgcgctacgcagacgggcagatcgtggcgacgctcatcaccggcgccgacggacgcgcgaccagcgagctgctttacctggggacatacaccgtatacgaggcgaaggccaaagacggctacgccctcgacgttgccgagaaaagcgttgctctgacctaccagggccaggaggtttcggtgttcggtgagcagattgacgtgaccgacgccccgaccgagctacagatcgtcaaagtgagctcaatcgatggcgagaccccgattgagggcgcgaccttccgaatctggaacgactcaggcgatttcgatgagactctgacaaccgacgcaggcggcatcattgcgctcaagtatctgaagcacggcagctaccacatgcaggaagtcgtcgcggcggacggctacgtcatcgacgacgtcgacgacgagggcaaggctcgtattcacgactttcaggtgaacgaccagggcatggtcgccatggccgacgagcccatgcaggccaagctcgccatcgtggtcgagaacatgcccaagaccatgggcaccaccgcgaccgacgccgacagcggcacccatgaaggccaggcgcgcagcgacacgtcgatcatcgacagcgtcgcctacacgggatgcatccccagcgaaacctacaaagtagctggcaaactcatggacaaatccaccggccagcctgtgctcgatgccgaaggcaacgagatcacggccgagaaggagttcgtggcggagggtttcgaggggtcggttgacatcgagttcagattcgacggatccggcctcgcaggcgtctcgctcgttgcgttcgaatcgatgctcgatgccgaaggcagcatctacatgagccacgaggatatcggcgacgagggccagaccgtcaacgtcgtcgacatcgccaccaaggcccacgatgccgaaaccggcaccaaccagggcaccgtgagcgaagccgcgacgctcgtggacgaggtgagcttcgaggggctgacccccggcaaccgctacaagctgttcaccatgctcgtggacaaggcgaccggcgagcctgttggggatgccgccggcaacccgatggtgatcgagacggatttcgcgcccgaggcgcccgacggcaccgttgaggtcgtgttcggactcgacaccgctgacctagccggcaagtcccttgtgttcttcgagaagctcgccgacgacggcgacaacgtcatcgcgaagcacgaggacatcggagacgaggaccagaccatcgagcttccggagcctgatggtcctcaaaaccccgtaggcaagggataccccaagacgggcgccgatgcggccaaggcggctgttgcggcaagcgcggcggtgatcgtgggctgcggtgcggccggcgcggcctatgccgcggcgaagcgccgcaagaaggccggcgaagaggttgaggaaccgaccgccgaacctgtcgagtagcaacaacaaatcgctgcaagttcaggcgggcttcgattgaggcccgccttctttattgaaaagagagtgaatgaagaagctgaagaagatcgccgaaggccttggcctggtgctcgccgcactcgccgtcgccacgctatgcacctggatcgccgcagacgacagcgacaaggccgagatcgcgcaatcgctcgaaggcgccgtatcagaggaaagcgagcatgaggagccccgggatatcgactgggacagcttgtcccaggaaatcgtcgcctgggtggaggtgcccaacacgaacataagccagccggtagccaaggctgacaagcggaacccgaacgcctatctctttctcgatgcgctcggccaaggcggctacggcacgccatacatcgacgccgactgcacggaagagtcgctcctcgtcccgatctacgggcacaacatgtcggacggcagcatgttcgcggatttcgcgaagtacagcgatgaagattacgcgcgaagccattcgcgcatcttcctgcatacccgcactggaggcacgtatgagctatcggtcattgccgtggacgtcgtggacgccagcgctgagaccgtgtgcccaagcatcgacgatccaggggcgattgcggattggattggcaaaagcgatctcgttcttcatgaacacgatgggtcgagcaaagtattcgccttcacgacctgttcgtaccagaccgccaattcccgcaccgtcgtgtatgcggcaaccacaaacgaatgacgcgctcatccgcggacgctcgcccttgaactcgcctgataccacacccaacaacattgggcgctataatgtagcaaacgcatttgtattgcatttcgagcgataggggcacaaatgtctgacggttacaaggagctcatcaagagcaaccccgacgagacagagattagaagtttcctggtagagggaaatcaggtctccgtaaccctgcgcatccccgataccttgcgtgacgccgcgaaagaagaggcagcactccgcggcatgagcttttctgcgttcgtgcgcacttgcatgatcgaagagctcgcgaagaaggggcaatagtccgtggccgaaccgatgcatgaaatatcagtcgaaggcttcatagaatcttttgcccgtcgatacccaactttcattctcaagacgttgctgtgcgaccgcacgacgggacgcaacatcatatgggccgataacgaatacgaggccctgggtgaaggctatatgggtgacgaagaaattaccgttgagaagattacgggcatgaactctggcgtaatcaagccacgcattgccaaggagcaggagaagcaatcccaacgcaccaagagccgcgccgaggtgttcactccatcgtggctgtgcaaccaaatgaataacgacttagatgaggcgtggttcggtcgacgtgacgtctttaacgtcgagattgttgctgatgacagcaccaaagcatggacggcagctaatgggccgattgaatttcccaagtcgaaggggcacggttggcatgcttatgtagaggtgccgcggcttgagatcacgtgcggcgaggcaccgttcgtgtgctcacgttacgataccgtgacgggtgatgagctgcccgtgcgcgagcgcgtgggtttcctggaccgcaagctgcgtgtcgtgaccgagagaaccaagactcgcaaggaatgggttcgtcgtgcgctcgatgcgctgcgtgcgacgtacggcttcgaatatcagggcgacaacctgcttatcgctcgcatcaatgtgcttgagacgttcgccgagcatctccgcgaacgctgggggtcggaacccgagcaagatgagctcgagcaggcggcttggatcgtttcttggaatttctggcagatgaatggcttcactgacgccgttcccaccaacaagatgggcgccgaagtggagtcgaccctggggacgttcgaggagcccgagcctgagccgatacaaccatcgcttttcgatttgttcgacgacgtattccccgatgaggcaaccgaagagaccaaagaagaggagccgaaggaaacggtccctctctgcgtgatatacgactggcagaatggcgagccgttcgagttcgccacattgaaaggcaagacgacgaatatgggaaagaagttttacgcggtgattggaaacccaccctatcaggaaagcgatggaggacacgaagcttcagcagccccaatttaccatcactttgtcgaccaggctaagaccatctctgagcgcgtttcgatggttacgccgtcaagatggtttagtggcggcaagggcttaaattcgtatcgtgaatctatgatttccgaccaccacctaaagacacttgtcgattttccaaagctttacgagccttttccgaccgttaagattcgtggcggagtttcctattttatctgggattcgtcatatgaaggaccttgcctcgttcaaacaatggaggagggcaagccagcatcgccagctgttaaacgttatcttgatgcgtatgatgtcttgatacgacgcaacgaggcgattcccatactcgataaagttgcaaaacgcggtgagccgacattagacaaacgtatttcagctcgtaagccatttggacttccgacaaattaccacgggccaagttcgccagacgggatcgatgaccctattcaacttttcgaatcccaacgagaaggatggatttccaggagcgatattaccgtcaatgccgactggattgatggctggaaggtacttctcaaccgtgtccaaggaactagcgctgccgtagaaacgaaattcatgtcgacgcctaaaatcgcaggccctgggtctgcatgcaccgaaacatatttagttgctggaagattttcaagtcagaaagaggcgcagaattacatttcttacttaaagactcgatttgtcagattccttatttctctcagaaaaatatctcaagatgctgccaggggtgtttatgcgtttgttcccgacctcgattacagccatccttggaccgatgccgacctgtataaacggtatgagattactgataaagagattgcttatatcgaaacgattgtgaaggagatggaatagccatggccttctccgacatcaccagcaaagttaaaacaggtcgcccggtattgccccagatctacgcctacaccacgcccgaaatcgcgcggcacgatggatggacgaagattgggtacactgagcaagacgtcgaaacgcgcgtcaagcagcaaacccacactgccaacgtttactacgttatccagtggcacggcaacgcaacatacgaagatacgggcgagacgtttcgcgacaccgacttccacggctatctgaagaagctcaacgtcgcgaacgagccggataccgagtggtatgagatagagcccgatcccgcgaagatacgcttctacgagttccgcgagaaccacggcattttggaggcgcccgccgcaatagagtatcggcttcgcgccgagcaggaccgcgccgtcgagcaaaccgtcgactacgcccagcaccaccaacgtggggaatacctgtggaacgccaagccgcgcttcggcaagacgctcacgagctacgacctttgccgcaagctgggagccatgaaggttctcattgtgacgaatcgccccgcaatcgcgaactcgtggtacgacgactacgtgaagttcatgggcaaggaatcggggctgtgcttcatcagcggcgcgagcgcgcttcaaggcaagcctttctgcatttcgcgcgaccagtacatcgagaacctgcgcgatggcggcatcaaggggttcatcgagttcgtgagccttcaggaccttaagggatcaatcgagttcggcgggaagttcgacaagctcaagcacgtctccgaaatcgaatgggacgtgctcatcatcgacgaggcgcatgaaggcgtcgacaccttcaagaccgacgtggcgttcgaccatatcaagcgtaagttcaccctccacctctcgggaacgccgttcaaggccatcgccaacgagaagtttcccaccgacgctatcttcaactggacctatgccgacgagcagcaggctaagcgggactggagcgaccccgagcttcccaacccatatgccgagctgccgcgcctcaacatgttcacctatcagatgagcgacatcgtggcgggcgaagtgcagcgcggttgcgacatcgacggcgagaccgtcgagtacgccttcgacctcaacgagttcttcgcgaccaagaccgactcaaggggattcgtcttgtttgtccacaacgacgatgtggatcgcttcctcgacgccctaaccactcagaagaagttcccgttctcgacgccagagctgcgcaacgagctgcgccacacgttctggatgctcaaccgcgtggactccgccaaggcgctcgccaagaaactgaacgcgcattcgatcttcaaagactacgagatcgtgctcgccgcaggcgacggcaaactcgacgacgaggacgagtcgatcaaggcgttcgacaaggtccgcgaggcaatcgcgaaccacgacaaaactatcaccctctccgtcggtcagttgacgacgggcgtgactgttcccgagtggaccgcggtgctcatgctctcgaacatgaggagcccgtcgctctacatgcaggccgccttccgcgcgcagaacccgtgcctgttcaggtacgatggcaagttccttcgcaaagagaacgcctacgtcttcgacttcgaccctgcgcgcacgcttgacatcttcgagaagttcgcgaacgatctctataccgacacggcctctggcagcgggacgctcgacgaccggaaacgccatattcgcacgttgctgaatttcttccccgtcatcggcgaggacgagaacggcgagatggttgaactcgatgccgagcgcgtgctctccatccctcgcaagatccgctctcgcgaggttgtgcgtcgtggcttcatgagcgacttcctgttccagaacatcagcaatatcttccgtgccccggcagaggtcatcgaggttttgcagacgttcgagccctacaaggcgccaaacgaagatctaggcgtgaagcgaggcactgccgacgagctcagcctcaacgaagatggcgaagtggaaatccccaccgagcaggtagtcgggcttgcggaaggcatgtttggcgacaaggtgtacggcgacatcgccgacgacctcgacgacgtgatcgattcgataaccgtcgaagactcaggggaccctgacgaaatcttcatctctaagctgtccgaggcgttcggggcgagcataaccaccccgcttgtggagaccgctgaaaaagaatacggcaaggacatgaagcccgcccagcagcagaagatggcgcggcgaatcaaggcggatgtggacatcaagctgaaccgcgaagtcggcaacttcaacatcgccaagaatcgcatcgagaaggaccgtgccgacgagcttgacctcgcccaaacccaggagcaggccgacgagatcaaccgcaggcacaacgagaagctcgaagatgcccgcaaggagctggtgggcaagcttaaagattcgcgcgatgaactggtgagaagtgctggcgagaccgtggttcgcgaagtggagaccgccaagaaggaagccaagaagcagactcttgagggcaacattcgcgaccatctccgtggtttttcccgtactatcccgtcattcctcatggcgtacggcgacgaggaaacgacgctggcaacgttcgatcaggttattcctgccgatgtgtttaaggaagtcacgagtgtaaccgtcgagcagttccgcctgctgcgcgacggaggcgatgtgatggaccccgagaccggcgagcctgtccattttgcgggtgagctcttcgaccctgtggtgttcgacgattcggtaaaggaattcatcttgctgcgatcgaagctggccaactacttcgacgagtcgcttgacgaggacatcttcgattacgtgccgccccagaagacgaaccagatcttcactccacgcaacgttgtggtagagatggtcgatttgttcgagaaggagaacccgggctgcttcgacgacccgagccacaccttcgccgacctgtacatgaagtcgggactctatatcacggagattatcaagcgcctgtatcaaagcgacggcatgaaggccatcttcccggaagaccgtgagcgcttggaccatatcctagagcatcaggtatttggcatcgcaccgacagaaatcatctaccagatcgcgactcattttattcttggtttcaacgacgagattggcaatggttgcgagtcgaatttcgtatgcgccgattcggccgcccttgccaaggaaggtgaacttgctacgtttgtggagcaagttttcggcgaaaagttggggtgctagatgggaagaagaacgattaatgcccataagctggtctttactaaactgagggatgtcgaaaacgttctctcaccaaaagatttaaacggtgagagcctgatcgatgtcgtcgaagaatgggcggaagggcttcgaaacgacgacacgattgaagttagcgctgaaactcatattgccgtcgagagggtcaccagattcaataacaatattctaatcatcgaggttatgtcggggaaatctggcgaaccgggcattgttcatgatctggagggaatagcggacgatatacctatcaaggaaatgcaggcgcccatgtcgcattcccgcgccgttttgtttagcccagacaatggacagatggcgatgtggttctctgaatatagcgcacgaagcagcggcgctcgtaatttgcttacattgttgaagagggcttggccacgcttaaatacaggagcaaagttcactgaaagacgcgtaatcatgagcgaagtattgaccgacggcggcaagataacggaggttgaagtgcgcttgacacggcgctcttcggatttagcagatggtgcgctctcggaaaccggaacgtattctcacgtatttcggccagataggaagaatcctctgccaataaggcttcttgaaactttccgaaaaaacccgacgaaggcattcgaatacgttgagctgtcgcaaagcaaccttgatgagcgtgaggtatttgtgtctgtcgatatagatgggcataagcgaaaaattcgggtttccgacccagatgatggcgtctattaccatgaagaacttaatggcccaggagaaccaattcttacggatagtgaattggttgaattctgcagcgaagaaactgttacctgctttgagcgctctggctattgctgggacctttcatggtctcaagcgaatgcgtgattatcatgggtatgtcgtctgtttcggggatagcaaaggcatatttctccaccctggccgaccagcgtacaggaggcgttaatctcggcgccgtaatcacacagtttattgtgccagcaacaattggtatagcttggtcgttggcaggaccctcgatatcgacccccggaaacgccatcgtcggcatctccatcgtgtccgccttgctctgcgcaatggcaacaatgctttttcagattagaatcgatttaagaattcgggcgaaagagggcaaagagtcttttgtgactgagcgggatttgaagctcatagaccagcttttcttcgctgttctttgggctatcctgtttggtttacttgtcgtgttggccatggtggcctctgaatggtttggggtgtttcagctcgtgggtctaccagcaaagatagctgcaggcttcatggtctttttcattgggcattttgtcttcgtgataggaactatcctcaaacgcatgaatcgagtttatgaaattgtcgcacagaataaaaggaagggctgaaatagtgcccatcagctttctatgtaaggcctttgccttttgacatctatcgggttgtttcggtggcccttgaggttgatttgagaaccacggaggcattcttatggatgaatcccatatgagaaaattgcaggaagacaacgatatggcattcttccgcgcggatttgtgcctggaatcgcctgggtctttcacggccggcgagatggcgcgcatctgcgatgaaatgagttcgacaaacaaagccatcgaagacacaatgcgagctgattttgaatcgcttgcgcctgaactgcgtgcggcgctcttggatatgctctgcgactctggcgaaatgacgcccgaatggtggtgcgaagtgcttttaggaataatgcccgattctccagacgatatctttgggcattagcgagcccgcctcagccgaggcgggctcgctttgttttgtccagcatactgaacttcagaaggcacgttttccgatccatgccacaagcccaatgaaggccagacatagttttccgataatgccgaatacgcatttaacgatcttcattttcaaatctttccagccaattctcttcttgtttgtcggcttctgtttcgttcggtaattgcccagggcaagccgctttgagtcgatagacgagctcttccgagcagccgcagtgccgcggtatcgaatcgcgtgctataccgcagtccacgtgcgagacggtagaaagactatcgaacaggtgcacaatggtttccgcaaccgatcggtttgtcgttccaagccatagccttgcagatctcatcagctggccaacatcgaccatctcgttgaggacgcgcgctaaggccatctcaccgtcaatggcgacccactcgagttcgtctagctctgaagcttccgccagcaggaagcgccagccgcgcctgcgcctggcaacgggcgtctcatcgcctgggcgttcctcggtggttgaagggtcggcgtcgtaatggtgcgcggcaagccacaatcctgtttcccccagttggtcaatgcgcagctcgaagttcgtaagtgcgttccctttccctaatgggcttggggctgtgaacgacatcgtgtcgaatacgtcgattctgccgtttcgatacgccatctctattctcatttaccgttcacctcgatctacccggcgttgctctcgttggtgttgcggtgttgtttctagctccttgtttcgaccgtttgacgcatgggcgctggctcgcctcctgccatcgttggggtgcatgcgcggctcgcccttctcgggcagcagcccgtacgaggcgagtatctgggaggcctcgcggatctcagccgcggctgcgatggcgcgtgaatcgctgaagctctgctccgccttggcctccatggcgcgagccctcgttatcgcatccgcgcggttcgctatcccgtacttagagtacgtctccagggcgcttgcaaggtcttgcaggtcgctcaggctctcaagcgcgatcgcgttccttgcggctttcagtacctcgcggttgctcatgccttcgaggctcgtttcgccgaagctcctcccgacggcttgcttggtgtaggcgtacccgagtttgcctccggtaaccttgcatttcggcgtttccctcatgctgtagacccagtcgtcccgtccgccgcgtgtcgatgccggcgaaacctcgatgcccagcaatccgagcacctgcctgaactcggcatcgcttcttgagagcttcttcgctatgcctacgcggcacctgatgtccgatacccacgagtaaccgccttctgagactacctcgtgctcggcgcggctcatgtggacgtcttgccgtttggaaggcatcttgcgcccatgctctttctctgcaagccttccgatgccgctcttggccttcgactcgttggaaaggccgctcagtccgcgcttccgggccatgtcttgcaaggcgcggttgagttcgagcgggtttctcgtctgcatcctgttgccggttttcaggttggtgttgttcaccaccacatgcgcgtgcggtatcccgttggtgttgtcgtcgtggtatacgatggctatctggtggtcgccgaagaagcggagcgcccagtcgctcgcaatcccgcgtagcgactcgatgtcgatatcgtcctctgggtcgggcgagatgacgaaatgcttgtaggtgcgtgcctttctgcctttgcaaggtgcgtcgttgccgaaggacgcacgcatccggtccatctcgcgatcccattcgatagcttccttgccagcctggtcgtagcttctcatctcacgttcgtcccaggacaggttgaagaagtcgcgggctatggcgcgcccgttcttctcaaggtatttccggacgttgcggcagcccgtgtgtcctgatatcggcttcagtatcggcatggcccgtcgcctactacgatggagccttccagttcgtcaagccgaccctcaagcctgcatcggccttcttcgaccgcatcgagcttatcggtcgcgacgccgatctgctggacgaagtaatcccgttcgggggctttcctgcgcgctgcgaacgctattacgttgagggcgtggacgccctggttgtaatggcgcccccagcggacgagctcgtagcgcagggcgccgagcgtcttcgcgtcgacgacaagcacccttgattcctttgggtctggacatgccgatacggggatgcggatgaggtagcgcatgtaggtcgacggggcgacgtcgagggccgcggcgttctcgtgcagagatccgtagtcccggtcgtcgagcctgcaggtgaccatgtgggttttcgtggccatgggattctcctttgcggtcggcgcagccaaacgtggaaggtgctgcgcggttcgtttttagagcgagctattgctcgccggggagcgggggcggcccccgcatgcttctttcctgcggcggcgtcgccgctgggaggaagcggttccgagccattgcccggcacggcgccaaggcgccttcggccgttgcgcatcggctcggacaagtgctattccggcatgcgttggaaaacgtattacggaataggctacttgctacctaaggggttgaagatgcctccggtgcatccatcagctttcgaagggcggcttgaatcgcctcgatgcatttcgcgtcgtgcggcgcgggcattcccttaaggtccttcgcgtacttttcgacgagcttccttgccttggccagcgagtcgtcggttcgcgattccgaagggcgaatcgagagaagggattgggtgatatcgcgcttcgacatgccgtcgacgtccatctccctgaaagccttctcctgcgcttgtttgggcatggcggcgagctccttcactgccgccgccgagatcttgccggcgtttgccaggggtttccaagagtccgacaccgatttctcgatcgttttcgccagagcctcgtcgcgcttgatggtctttcccgataccttgcgtcccgtctgcttctcgatgatggaggctttgatgtcctcggtgcgcacgcccgaaagcgctgggtccgcatcgcgcatgttctgaacttgcgcgccgagggccctcgtcgcggcggcgcgctctgccaccgtgagctcgcgcacgaagtagttggccgcatgaagcatggacaccgcctgctcgtcggttatgccctcgacgatgcggcagcccatctttctataggcggggttcttggcagccagcagcctgaacgcggcgcggcgcctatgccccgatatgagctgccagcgcccgtccgtcagcttgcggacaagcggcaagtcggtgaggccgtctttctcgatggattccgccagcgcctcgatggcggcttcttccatagagtagacggcgtttgcagggttgtcttcgatggcgtcgatgtcgagttccgccactgggtatttgcttctggtcttagcgcccgcatcgagcagcccgctgatggagaaccctgcggccacgtcacttgccgagctcatcggagacctcctctgcgagtgcggcatagtcctttgccgcgcggttcttcgggtcgaattccacaaccggctgccattgccagctgccctccatcactttcgaggaagagtggatcacggttcggagctggtcgttcgggaagaagcggtcgagaacctctgcgcccgttgcctcgctgcgcgtcgcgcggccgggaacgcaggtcctcagaatcttgaagcgaggcgttggcatgcgcagggcgtcggcgatggcgcgcgtggcgttcactgtgagcgcggtccctcgcatcaccgacccgtcgagcttcacgggcacgatcaccagcccgccgtccgctgcggcgaggtacgcgttgaaggcaaggcgcttcatgacaggcgagcagtcgacgatcgctatgtcgtaatcgtccgaagcgtcgtcgagcgcgaatttgagccgctgctcccgaagcatcagctcgttctggtcgataaggtcgatgagcgacggcaccatgctcaggttcagaatcttggttttatgagtcaccttctctatgggggcgtttccgtagagaagcgatatggagttgcgtccggtggactcggcttcgccgtagagcccgaagtaatcggtcgccgacgcctgggggtcgaggtctatcagcaagaccctctttccgttcttggcgaacagcgtagccaagttgacggcagtggtcgtcttgccgacgccccctttgtaattcgagatggcgatggtgttcatcgcatcctcctttgcattcgcgccctggctgcgcaagatgtggaaggggcgcagccaggggtttcgtaatacattttcattgtatcaaataccgttcgatattgaacggtatttgatgcggcaaaagctccgaagagacggaaaagcgccttcgaatcgcttttccgcggcaggtgcaggatgccttcgcatcctgccgtaggggtttggggacgaggagtccccatgctcggcttccgcgcccatatccgccgcttgggctcatttgccgcaggcgagcccgccgaggttgccctcggcgggccgctgcttgcccgaaacggcccagaggtcgctaggccggatcggctgacagtgcgttgatgtggtggcggagcatcgcgcggctttcgccgatgaccaccatcgagatgatgtcgaagcggacggacacgtcggtttcctcgtagccggccatgtaggcgatcgcggtgcgctcgaacttggcgcgcttcgcttcggtgccagcctccgccgggaagccggcctcggcgcccgtcctggcgttcacctcgacgaagacgacggccgcatcgtcgcgggcgatgatatcggcgccgcctgccgcgcattcccagctggtctcgaggatttcgtagcccctcgactccaggaatcgctcggatgccttgattgccttgggcttgagttgctctgcgttcatggttgacctccatcgaatcttggctggaccctttgtcctgctttgtgattcgaaggccgcgccgcggggcgcgcgccgcaagggaggaaagccgaaggcgtcttgttctagccctctccgccgcaagtttccctaattctttttcagtcctgccctctgaatatcctggaaaagaattcgggaaagtttcggcgcccttgcggcgtgagccccgttgcgcgaacgtggcgaatccaaggaaggcgaaggggcttgctggttcgggggcagccggcgctcacagaaaaacgccgcgagggcttcgatcagccgcgtcccatctgctcgatcagggcatcctcctcgtcaagcgggctctcgacgtcggcaatcccgaggaaaaggtcgcatagcagctcgaccctcgcttcgagctcgtcgcccagatcgcccgtgttgcgcaggcggctcagctcgccgacgacggcgcgcatctcgtctcgaagcatcttgaacgtgcggatgtccgggacgatggtgaactccttgtcctcgatctttgccatgatgtactcctgctgcgtgactccggccgcctttgcgagaagctcgatgcggtgtctctcctcgggcgagcagcggaacgccttcgatatggttcgcttgcggtggctgttcggacagggcatcagaatccacctcgctcttcttcgagctcgttggccatgtcgtcttgcacattcgggaacaggtgggcgtagcggaaggtgatgtcggtcgcctcgtgccccatgcgatcggcgatggcgagggcggtgaagcccatgttgatgagcaggctcacgtggctgtgccttaaatcgtgcacgcgtatctttttcacgccgctcgccgcgcatcctctctgcatcgcgtgcgatatgtagtgcttcgacacagggaacaggcgatcgccttcgccaatctccgggtggtggttcgcgtaatcgcgcacctcgtcggcaaggaagcgcgacagcttaacggttcgcaccgatttgggcgttttcggatcggttatcacgtcgcggccgcccagcctttggtaggacttgtcgatgcgcatggtcgatttcttccaatcaaacgagtctggcgtgagggccaggagctctccctcgcggattccagtccagtacagcacctcgaagatgacgaacgctcggggatcgtccatcattgcgtctgagaacctcagatattcgtccttggtccagaaattcatcgtgcgggcttccttgccgcccatcttcacggttctcattgcagggttggggctcagcccgtagtacctcttcgcgtggttcaggatggcggtgagctggttgttgagcgttcgcaggtacgtggcgctgtagggcttgccgtcgtttgcgttgggcgccataagggcgttctgccagcggacgatgtcgattgtgcgtatctcgtccatcttcttgttcgcgaagaaaggcagcaccctcgacttaatcgcgtactccttctgccgccaggtgtgctcgcgcagcctggggcgtaggtctgcttcgtaaaccttgaagaaatcgccgaacgtcatctccatagtgcagcctgcgctggctatgaactcgtcctcccaggcctgcgcctcttccgccgacgcgaacccgcgcttgcatttgtgcacttcgttgccgaacttgtccttgcacctgaattgcgcgagccaggtgccgtttttggctagctttacgctcatttccaacctcccttcggcttgatgtagagctcgttcaaaagctcgcagctcacgtggcccgggatggtcctgcagccctttctctccatctcgcgattcagctcgcggataagctcgtaggccttcgtccttccgatgtgcagcttctctgcaacttcacgggcgccgataagtcgtttcagatccttggacatgttttcctccttacagttcaataacgaacggtgactaaagcgaatcgtaaccgttcaatatcgtgcggtcaatatcaaaccgttcataaacgtgctattatttccgcgttatgttcagtcatccgtccgataggggcgctttcgggaggtcacatgggaaccggcgaactcatcaggaagtaccgcaagatgcagggtcttacccaaagcgagctggcggagaagtgcggtttgacggattcggcgataaggaactacgagctcggcaacaggacgcctggggaggctcaggtgaagggcatcgcgtcggctcttcacattgcccccgaatcgcttttcgatgttcctgcggcaacagcgcgcgaggccctagagctgattttcaggatcgacgaggagttcggcctcaagccgaaagagatcggcggcgaactcgttttggccatcgacccgtcgtcgaagaaggcgcccaagctcgcccaggcgctcaaagcttggctctcacagattgattcggaaaagtccggcgagatcaccgccgaagagctcgcgggatggaaggcaaaattcggagcctagcaagccactttgggaatgattgcgaatcacttttattggcaaaagtcgctatttcccgttgttgcaagggggcatgtgtcgtatctgcgcatgggtgcattattgcgatttccttacaaggagaaagggcgacttatgaaactcgctgaaacactggagcatatttcgacaatagcttttccagatatccattgcgactggcatacaattgacagcgaagctcgtccaagcgcaattttcgaggccttaaagaaatggaacgaggtcggtaactttgtccacgacaacttcaaagaaggtataagcttattggtttccactatcgaggcgggcattttcgataacgaaacgaaatcggtcgcaatgcagttgctagccgctctatgcgaagagggtgccggctattgcagaaacgaacaataccgaagcggaacaagaaacgaggttattctcgacttgtttcagtcaaacgacatgtttgttcgcaccgtgatagacaattcgctttacacaccaacgttgaatgcagcgttgctcgctgagtcgttctttcatcttgacgaatcatcgtttaagacggtgtgcgataagtgcatacgtgaccaatttccaaacggccctattccggattcgctgaaggaattgctgactaatatattcagatacaaccatgactttgaatgcttggttacggaggaaaatgtttatcagctatgggcgatgggtgtctatcttgactccgaaattcctgagcttcatttctttgaatgcacgaaagacggcatgactttagacgaatgcaaacgcgatatggatgccattcgttatgcttgcgatctcctcgaccggatttcgcgcggtgattcctgggttgctgactattgcagcgcttttgctacaccgttccacgctccactgctacagcgctccatggcagactgccacaccctaacaatctaaattgccacgcgccccgaaaggggcgcttccttttccgccacaattccgatgggcacaaaagtgcccatcggaccattgcgagaaaggaagaaaaaatggtcaagtacagagaaatacttcggcaaagggcgatgggggtgagtgtcaggaacacagcgttctcgtgcaggtgctccaccgcaacggtaagggcggtgaccacccgcgcgaaggcgcacggcctcgagtggcccttgccggaggagatgaacgatgcggcgattcgagccgtcatctatccggcaaaggagcgatccgatatgtcgaaggcggagatcgaccatccccgcatcgacaaggagatgaaccgtcccggcatgaccatgctgacgctttggagggagtactgcgaggacgccctggcatcgggcatggaaccctacctgtactccgccttctgccagaagcaccgcgcctgggcggccgccaacaaggtctccatgcgcatcgagcgcaaacccgcccaggagatgcaggtcgactacgtcggcgacaccatggaggtgctcgacgccgacaccggcgaggcgcgcaaagtctacgtcttcgtggcgtgcttgccctattcgggcgagatgttcgccgagggcgcctacaacatgagagcggagtcctgggtcgaggcccacgtccacgccttcgccttcttcggcggcagcgtgccgatagtggttcccgacaacctcaagcagggcgtcgtcaagaacaccgtcgaagagctcgtgatcaacgagcagtaccgcaggatggccgagtactacgggtgcgccgtcgtgcccgcgcgccccaggaggccgagggacaagggggcggtggagatgagcgtgagggtcatcgagcagcgcgccatcgcgccccttcgcaaccagctgttcacctctctccggcagctgaacgaggctcttttggagaaggtgcgcgagatcaacgcccgtccgttccagaagcgcgagggcagcagggatgaggtcttcgtccgccaagagaagccgctgctcatcccgctgccgggcaagccctacgagatggttacccgcaaggttgtcactgttaattttaactaccacgtctcgtttgacggatgctggtactcggttccgttcagctacgtcaagcgcgaggtggagctatgcgccaccagatccgctgtttgggtggcctgcgacggcgagcgaatcgccatgcacgagcgcatctacggccctaggggaagctaccgcaccaaccccgaccacatgcccgattcccatcgcgactttgtggagtgggacgcgaagcgcttccgtaaatgggcggccgggatcggcccgtcctgcggggaagccgtcgatgccatcttgaggtcgcgcaagatcgagcagcagtcctaccgctcgtgccgcgcggtgctggcgctcgcgaagaagcacggaagggagatgctcgagcaggcgtgcgccaaggcctgctctctaacgcccaggccgagctacaagacgatcaaatcgattatctcggagatgggggccgcagggcccgaggaccaaaacgccggagcgtatctgcgcggaggcgactactaccggaacttgagcgagggggacgatgaataatgacggcgagccagacgacgatggacaaactctatggcatgaggatgtcggtgatggcgcaagcgtatcgcgaccaggaggaatcgcaaggagtggcagagatgaccttcgacgagaggttcgccatgatagtcgatgccgaatgggacgcgcgccgcatcaacaggaggacgaggctgttgcgccaggccggcttctccgatcccgaggcgaacattgccgatgtccgctacgacgcggatcgcaagctcgaccgcacgaaactgatagagctgtccaactgcacatggataagaggccaccgcaacgtcgtgatcacgggcgcgtcgggcgccggcaagagctggattgcctgcgcgctcggggtggcggcctgcaacgccttcttcagcgtaaggtacgtccggttgcccgaaatgctcgacgagctgaacgtgagcaagaacgaggattggctcaaggcgaagaagcgctacacgaaatgcgacttgctgatactggacgattggcttttggaaaagctcgaggggaaggcggcgcgcgagcttttagagatagtcgaggcgcgcttgcgcagcgggtccttattgatttgctcgcagttctcgccagcaggctggcattcaaagctcggggaaggagcaatcgcagatgccgtcatcgaccgcatagtctatcggtcggacgtcatccatattgaaggcgacgagtcaatgcgcaagcgcatcggctaagagcataaccggccgtattggccaagaggggcgcttgcgcgcccctcgcaatcagagcaacccgcattgctacgtggcagtctgccatggaacgctgtagcagtggagcgtggaacggtgtagcaaaaacggcgcaataagcaggttgctatggagagtgtccccgatcagcttgaattgcatttcaaatatccaaacgggaaaaagggcgacatcatacggtatctattcgaggaatacgggtccgttgaaaagcaaacatctctggagtggttcggaagaattaacaaagttgacatcgatgttctgggatgtatttctccttctctggggctctactccgctgttgattctgatttcctggagttgttcgagaagcatcatttacccacgatggtctggaataagctcgaaaatcaaaacacgcactactttaagcaattgctttacgccaaaacggatgagtttcggaagcgttataagctgaaccagaggcagagtcaggaagcgttctatactgaagcggttttatctggaaatgctactccaaagtggaaaaatgagtttcagctattcgcgcttataaaggacatctacgaagacgctatttatcaatatcattcgaattggcttggcgcgcaatctattgatatttttataccgtctctcaaggtgggcatagagtatcaggggaggcagcattacgaacccatcgaattctttggtggggagcagggttttgaagacaataagaagagggatgcacgaaaacgtgcgctctgcttcgagaacggtgtaaagctgattgagtggccctatacggaaaacatcacgttctcgaacttgaaatgtcatctccacgatatgggcattgatatttagatgattgcgggaccagctaattaagacctgtgaccggctgggattcttttttcggtaaaacgaggattggggcagtatggctgggcttgggaatgagagctattgggtgtctgagcatgtgtagggttatctgcgggggcttggtttcagactgccgattgaggacacggaggggcacatagccgcctgggataggtggatgcgggtcgtgggcgactgtattcgtcaaccatgaagaaggccgcgagctccctggccgccacgtcgttggagtgcgtggcgctggcgccgcacgaccggcggcgccacctctgggcgcccgacggggccctcccgtttcgtttcatgggccctccgcaggacgggcatttcatattatccacggcatcctcccggaatcggtgactttttaccgccaaatacccttaatagagcaaaagccgagggtaacccctcggcttttggagatagctgaaacagctgtcaataaattacgagccggaccgcgttgtttttttgagccgttcaggtaatggcatcatatgaccaacgtaagtggcctgcgtttaaattagtcgtcgtagggataaatccctaattcgcgaagattctcttcttcttgatttcgtttttcttcgtcgacgtagtactgatagcttccaacatattcatcgtcatcatcttcgtcgatgacgttgttttcgctcacgtcgttccatgaaccgcattccttgcaacaccaactgccactcgagacgttgaaccccggttgatcgttcatgtacgcaccgcagctatcgcaaatccagtcgcagcctccgtcgtcgcctgaagataaggctccgattattgaatcgagcaaacccatttatgcccctctccgcaaatgcctagatgatgccaaggcgcataattccagcgaatggacttcgacctttagcatggtgcaatgttatcagatgactaaccgtattcattgcgacagagtgttttcatctcggctgtcgtaattcagggtttggggggaaaggctacagttgtgaggttgtgcatggatgtggatgagcggttcttcgagccctcaagtaatcttcctagcttcgccatctttctcctaacactcttcttagtttgctctcaattgaacagtagtgcggtcaattctcgaggggattcgataaacgaactcattttcaggatcgacgaggagttcggcctcagtccgaaagagatcgggcgcgaactcgtcctggcgatcgacccgtcgtcgaagaaggcgcccaagctcgcccagacgctcaaagcttggctcgcgcagattgattcggaaaagtccggtgagattaccgcagagcagctcgccgaatggaaggcgaaattcggagcctagcaagccacttttggaatgattgcgaatcactttcagtggcgaaggccgctatttcccgttattgcagggggcatttttaggccgaaatcggctcggtttacgatttgtcatcccctcaatttgacctggtgttttgctcaaataccacagaaaaatgccttgtgattcgcaattgattcgaatcaccctcaaacagcgcgacaatcgccaaaacactcgtcgcgggtggcttggcgattgtctctttttcgccaaactgtcgcatggtcgccatagggtgtgacgaatgccgaatccatagaatgacaacgaatcaaaatacctgttcaaaggcataaaaataccccggaaactgacgcttccggggtggaatcattctcgtgttttgcaagtggcttgattcgctatgactcccgatggaactttatgagccatggtgaatcattgtaggtggctttgcaaaattagcctagggtcactcccactcaatcgtcgccgggggcttgctcgtgatgtcgtacgccacccggttcacgcccggcacctcggcaacgatcctgctcgaaatcttccccagaacctcgtaggggagcttcgcccaatccgccgtcatggcgtcgctcgactcgacggcgcgcaggatgatggggtaggcgtaggtccgctcgtcgcccatgacgccgacgcttttgacgtcggggagcacggcgaagtactgccagacgctccgctcgctgttgcgctcgccggtttcctcgaacacggcagcgttgtaggcgtcgagctcctcgcgcacgatcgcgtcggcgtctttcaagatcgaaagcttctcaagcgttacggtgccgatgatgcggatagcgagccccgggccggggaagggctggcgatgcacgatgtggtcgggcagcccaagggccgtccccaaagcgcgtacctcatccttgaagaaatggtctaggggctcgatcaagtcgaagtgcacgccttcggggaacggaatcaggttgtggtggcttttgatggtgctcgccttgccgcccgtcttgcgcgcgccgctctcgatgatgtcgggatagatggttccctgcgccaagaactgcacgccgtccaggtcctgcgcgacggtgaagaactccttccagaactgcgatccgatgatgcggcgcttctcttcgggctccaccacgtcggcgagcaaagccgcgtagcggtcttcggcatgcacgtgcacgaagtctacgtcgaactggcgggtgaacacctcttcaacctcttcgggttcgtttttgcgcaacagcccgtgattcacgaacacgcaggtgagctgccgtccgatcgcgcgggcgcacagcgccgccaccacgctcgaatccacgccgcccgaaagcccgaggatcacgcgcttgtctcccacttgctcgcggattgccgcaaccgattcctcgatgatgctgcccattgtccatgtaggcttaaggccgcagattttgaacaggaagttctcgagcatggcaccgccgcattcggtgtgacgcacctcgggatgaaactgcgtcgcgaacagcctcgcctccgcgttttccatcgaggcgacggggcaggcggcggtcgacgaggtcactgtgaagccagcgggcactgcggtcacggcgtcgcggtggctcatccagacggtttgctcgtcgggcgtacctgcaagcagctcggatgcaccggtccgcacgatcgaggcggggccgtattcgcccgcatcggtgtggccgacgatgccgccgagtgcggcggccattgcttgctgcccgtagcagaagccgagcacgggaatgccgaggctcagtatctcggggtccaaagagggggcatcttccgcatacacgcttgcaggacctcccgacaagatgatggccgaaggcttctcggctcgcatctcttcggcggatatgtcgcagggaacgatctcggaatatacgtgcagatcgcgtacgcggcgggcgatgagctggccgtattgggctccgaaatcgacgacgacgactttctgatcaggcgaggttgctgcttgcgtcacgggtgctcctaatctttttacaaccgggtgcacgctggggttggatgtccgcagattgcgtgccgaaaaatatcaacactatagtacacgaacgtttccagtcggtttcgccatgtgcgtaagcgccatgccatttccttttcaaggtcatggttgcttgctgctcgccatcgcttcgctgcagaggcgccagcctgcgcgcagaagccccaaggccacatgctacggtcgatagcctcgcccgcgaccttaatgtttccgcagttcaactcttggtaaaccagaggtctacccaattcaaccggcggtcgctcggatgaactcgcaagaagtgatacgatgcgactgctgcacacgcagcgaattcaactcggaaccgaggaatgagcccatgagcacccaaacgcttggagcgatgatcgcatcgttgaggaaagagcacggaatgacccagctcgagctggcggagaggatgggcgtgaccgacaaggccgtctcgaaatgggagcgggacgtgtcgtgtccggatatcagcctgctgccgaagctcgcagagacgttcggcgtgtcggtcgatcagctcatgcggatcaagtcgaaatcgcagacgggcggcatccggaaagaagcggaacgcatcatcgcgctcgttctcaaggcggtcgccctggcgatgggggttgccgtgcttgttctgtcgatattgaggtcgctcgacatgtacgcgggattcaccctgctgggcatcggcttggcatgcgtggggatctctctcttctcgagtcaagccaacggcagcgattcgtaggcggagcctgcaatagcggccaagctcgatcgcaggctcccagcggtcggaaggtacgggcgaatcccccatccatgtcgcgctgtcgctgcaagcggcccggcgagagggagctcgccgggccgccgtgtaaagcaagcgcctacgcggttacgctgtcgaagtcgtccatcatatccttgatggaaaggacgcccaggatgaagccgcgcccgatcgatccgccgggaagcaccatggggtactcgtggccgtagaacgatccgccgcagtctcctgccgcccacagccctttgatgacgtcgccgtcgttgttgagcacgcggctgtgctcttcgacctgcaggccgccaacggttgcgagcacgccgggagcgcgcttgatggcgtagaacggaggctccttgattgcgttgtatcccatgaactcgcccttaacgccgaagtcctcgtcgacgcctttctcgcacagctcgttgtagcgctcgacggttgccaggaacgtctccttgtcgatgtcgtaggcgtccgcaagaccttcgagggtgtcggattcgatgatcgccccgctcttcacggccttcgcccaatcgtttgcagggtcggctgtctcgcggctgtggctgttgggattgggcatatcgtcgatgtggtccatccagcgcgaatcggttatctggaaggcgagcttttcgggttgcgccgctaccgcctgcaccacgccctggtagggggcatcctcgttgccgaagcgctcgcccttcttgttcacgcgcagccacgggatgccggagaagggcgcattgccctcgggcagccacgtgggatcgaagtgcatcatcagcgcatggggcgcaggtgtgatctgcgcgttgatccacgagcccatcctcacggcgtcgccggtgttgttgggcgctccatgcatgttgtgcacgccgagcaaaaggggagcgtagcattcaagcatctcctcgtcatcggagatgtcgccacatgccatcaagacgcccttggaggtgttgacgcgtacgtactcgcccttcttgttctgcccgataacgccggtcaccgcaccgctttcgtcggtgatgagctgcacggcgggagtgtcccacagcatggtggcacctgcggcctcggctttttctcccatgagcctgagcagttcggcgtactgggcgtagcgggttgagaagtcgttgtcgacgtaccatccgatggtctgccctttttcgacgacgacgggagtcagctccgtggtgttgtccaagatccagttcatcacctcgccgccgcggttcaggaagttcatgaccagctttccgttatcgcggccgttcgagatttcggcgaaatcggcgtacagttcgccggtgtcgaacggctctccgcccgattcgagccacaccttgttgttgatggcgttggcgcaccagccgttcgagattgcagcgttgcccttctgcaagacgacggtgttcagcccgtgggttgccgcgtacatggccgacggcgcgccggcggcgcccagtccgacgatgcagacgtcggcgtcgtaggtttcgacgaaatcggtaatgggctcgggcttcttcgaccagctccagcgcccgccatccgttgcggctgccgtgccatcagacgtctgcgcatccccggcagacgcctgcgggcttgcgggcgaacatgccgccaaaccggctccggcggcaacggctgcgccgcttgccaaagctcccttcaaaaagctgcgcctcgaaagatccctcataagtagcctccattcttctgagcgttccccgtgcaagaatctcatttcgtgctataacgtttgatcgtgtccggggtggtgcgtatccctttacgcaacaggtaaaaggttagtcaccccgagctgttttgaaatcgcaacacgctgcttcatctgggtgatttctcggtgatttcgtcacccttttgcagaaaagttgggttatttaggggatgtgagggcagtgcagatggctcgaaaaaccatatcgttcagcgcccgggctgaaaaactgtggaagagcttcttcccggtttcgttctgttttatggggatgggcatctttcgcgtatggaccgaaaccctctataccaattcgcaagtcagttttcctgcgctttctttcgaggctctggggtcgtttttcgacgcctatgcgctgttcgactacctttcggccttcattctcgtccttttggcgatttttgctaaaaagatcgcgcctctctacgctcacccgtgggcgattgccgtgacgtttgtggcgatgataagcgcagtctgcatcaacttcgcatcgatttaccatcccgaattggcgcccgctctcgcgctgccggccgtcatatccggatcgatcggcgttgcgttcattctcatgctctggtcggaattcttcggctgcatcaaccctgtgcgcgtcgtcggctactattccgcgggcatcgccgtcagctgcattgtcctatgggtgttcaaggggcttttgctgccctggctgtgggtggggacatgcgttgtgcccgtggtttcgctcctgtgcctctggcgttcgtacgcgaggctgccattcgatgcgtatccgcccgcttaccagcacgattttctcttcccgtggaagccggtgctggttattggcatctattcgttcgtgtacggcatgcgcggcggcgttttctcaaacactctgtcgatgaactccgggatgggcgcgttcgcgggtgcgcttgcggtgtatctgcttgtgagccgctttggcgaaaagctcgatttctccctgctctggaaaatggccatgcccctcatgatcgtatcgctggcgcctttggacggagtcgttgccgggtggtcgacgatcgcggatttctgcgcgctggcaagctataccatactgttgttgctcatcatggccatcatgagcaatctgagctatcgctacggggtttgcgcgctctggattttcgcgatcgagcgggcgatccgcatggcgtcgtctcagacggggcggctcgttggggagaacatcgtgaattcgactgcgtttcccgatttcatccagccgatcgcgcttgtggtcatggcgggttcgcttatcgccgtcatgtgcgttttcttctcggaaaagcacgtcacctcgcagtggggagtggtgctcaagcatcccatagccgacgatcttgagctgtacatggagaagaaccgcctgggcatcaagtgcaaggagcttgccgacgatcatggccttacggcgcgcgagagcgagatcctgcttctcatcgcgcgaggaaggcacctttcgcagatcgccggcgaactgaacatcagcaacaacacggtgaaaacgcacacccgccacatctatgcgaagctcgccgtcaattcgcgccgcgctctcatggctttgctgggggtgaagaagcagtcttcaagaggcgaagcgaaggagcctgatcagataggcgaatgagcgaaagccggcgggttggcgccctctgacggggtgggagtcgtgcggtgttcgggcgcttttgtttccggctccttttttcggatgacatcatggtgtatttttcgcggcctgcggggtcgtcgtgtacaatgcagcgcatggacaaaaagcgagtggaaatagacgaggataaacgcagggacctccatgagtccttcaacaaccgcatctcgtacgtgtgcaagctcgcggcgctcgttatcgccgtcgtcgcattcgggtcggtcattctcggccaggacgacaagacgttcgtgatcctgggcttatgcgtttccgtcgccctgctcgccatcgcgtcgctccaagacaactccggtaagaagtaaaaggtatctcaacgtatgattatcgaagcgctcaaggccttcctcatcggcatcgtcgagggcatcaccgaatggcttcccatctcctcgaccggtcacatgatcctcgtcgacgaattcgtgaagctccaggtttccgaagactttctcgcactgtttctcgtggtcatccagatcggtgcgatcctcgccgtgctcatcctgtacttccacaagctcaaccctttctcgccgaagaaaacctcggtggagaagaaaagcacgtggaggttgtgggggatggtcgtcatcggctgcattcccgccgccatcttcggattcgcgcttgatgactgggtgaacgagcatttctacaacaaggtcgttgtggcctcgatgctcattttgtacggcatcgtcttcatcgttctcgagcgccgcaaccgcaagcgcttgcggcaggccgaggccatggttgccgctccgcgcggccgccatgcccgcatcgacgcaagcgatacggcgcaagccgccgaagaggctcttttcaaggtgaacgatgtggacgatatcgactggaagaccgcgctcaagatcggctgcttccaggtgctcgccatcattcccggaacgagccgatcgggtgccaccatcatcggcggcatgctgtgcggctgctcgcgcaccgcggcggctgaattcaccttctttttggccattcccgtcatgctcggctgggggcttgtgaaggtggtcaagttcgtgctcaagggcctcgtcatgagccaggtggagattgtcgtgctcgtggtgggcatcgtgaccgcgttcgtcatgtcggtcatcgccatccgcttcctcatgggctatatcaagaagaacgacttcacggcgttcggttggtaccgcatcgttgtgggcgtgctcgtactcgtctatttcttcttcgagtcgatgggcatgctgccgtagccgatcgccgaaggcggctgtcggcagtgcgtgcttttttgctcgcacgtcggtgcgctgccatcgttgcagcgggcgctgcttgggctaatacgtttccaccatgtcgatcagctcctgctgggaatgcagatccgttttctggtaaatgtgtttgatatgcgtcttgatggtgttgcgcgagatcttctctgagaactttttccgtccgctccgtgcgctgcgcggcttttgctatcatgatgcccacacgagggcgcttgctcgcctcggttgtcgccttcggcgctgccgttgccgatgcgccatgctcgttaccgttttttgtggattcgaaaggaaagccgatgtctgaagaaaacagcgtactcgcgcaaatccaagaacatcgtgcaaagatcgatgagatcgatcgcgaaatcgtctcgctgctgaacaagcgcgcaggccattcgctggtcatccgtggtctcaagcccggtgctcatctgggcttgtatgacgcgaggcgagaagaggagatcttcgagcgggttgacagctataacgagggtcctttgtataacgagaacctgcgtgagatatatgccagcatcctcaaggttatgaaggagaccccgtcagtatgaacgagcagatagcaaacaaactgccggattacgggacgcgctctgacgagatcaccatcttcgccggaccgtgctccgttgaatccgaagagcaattcgacgaagtggccgaatgcattgcgagcctcggtctcacgtgggttcgcggaggcgcgttcaagcctcgcaccaacccgcattcgttccagggtctgggcgaggaagcgcttcagatcatgaaggcatcgggcgagaagtggggccttaaaacccttaccgaggttatggactccgcgcattgcgagcttgtgcactcctatgtggacggcttgcaggtgggcgcgcgcaacttccagaacttcagcctgctcaagaacatcgggatagttacggccgagtcgcataagatggtgctttacaagcgcgggttcgcgggcaccatcgccgaatggctcgccgctaccgattaccttaccgccgaaggcaacgacaatgtggttttgtgcgagcgcggcatccgcaccttcgagacggctacgcgtttcacgctcgacatctcggctgtgcccgtcatccacaagcagagcctctatccggtgtgcgtggacgtgtcccatccggccggcgtgcgcgacctcgtgccatcgcttgcgaaggccgccgttgcggtcgggtgcgattcgatcatgatcgaagtgcatcccaatcctcccaaggcgctctccgacggcccgcaacagctcacgcccgcccagttcaccgagctggtggcagagctccgcgaaatcgccgccgtattcgggaagaagatcgtgtagcccgctttgggtttgaacgcgagctgcgagccgaacttgcaagctgatccatgcagcgccgcccggaaacgatccgggtggcgcttttttggtgcacgcatgtctcgcgggagccaaaatcgccgacctctgtcgggcgcggcggtcggggtttccccgcgcgcctggcgcatgcggtttcaacgcaccaacttgcgcatttgcatttctcgttcagcatctcccgctgcggtgaagaagcgctagaatgaactcttccaaaactttagccattgatgaccactgatccgaaagcgtagtccatgcctatcgacatcgattctctgaaccctgcccagaaagaggctgtcctctgcacagagggcccgctgctcgtgctcgcgggagccgggtccggcaagacccgcgtgctcacgtaccgcatcgccaacctcatcgagaacaaggacgtcgctccgtggcggatccttgccatcacgttcacgaacaaggcggcagcggagatgcgcgagcgactcggggcgcttgtggggccggctgcgcgcggcatgtgggtgtcgaccttccacagcatgtgcgtgcgcatgctgcgtgccgatgccgagcgtctgggcttcaccaaggcgttcaccatctacgctgacgacgattcgaaacgcctgttcaaagatatcatggcggaactcgatatcgatccgaagcgctatccggtaaacgcgctgagaaaccgcatatccacggccaagaacgagcttatcgtaccgggcgatttcgaggcgcaggcggcggaccccattgcgaaggtggcggcgcgcgtatacacgcgtttgcaggagcgcttgagggccgcgaatgccttcgacttcgacgaccttttgctttacgcgtacctgctgctcaaaaaccaccccgatgtgctcgatgcctatcaggaccggttccgctaccttatggtggacgaataccaggatacgaaccacgcgcagtacgcgatcaccacgctgctcgccgccaagcacaagaacatcatggtggtgggcgacgacgaccaatccatctactcgtggcgcggcgccgatatccgcaacatcctcgaattcgaaaacgactatcccgaggcccataccgtcaagctcgagcagaactaccgcagcgtcggcaacatcctcgccgccgccaatgcggttatcgccaacaaccagcaccgcaaatccaagaagctcttcacttcggaaggcgatggcgataagatccaggtgtacatggcctccgacgagcgcgacgaaggccgctggatcgcgggcgagatcgagaaacgcaaggccgaagggttctcgtacaaccagatcgccgtgttctaccgaaccaacgcgcagagccgcatgatcgaagatatgctcgtgcgcgcgggcgtgccgtaccgcatcgtcggcggcacgcgcttcttcgaccgtgcggagattcgcgacgtcatggcttatctgacgcttgtggtgaaccctgccgacgacatggcggccaaacgcgtgatcaacgtgccgcgccgcggtatcggcaagaccacgatcgagctcatcgatcgcgaggcgcgcgagaaccgcatgacgttcatggaggcggccgagctcgttatcggcgacgagagcgttcggcttgcaacgcgcaaggcgctcagcgagttcatcggtctcatcaaagatgcgagcacctacggcggcgacctgcgcaaggtggtcgaggccatcatcgacaagagcggccttatttcggcgctcgtcgccgaagacaccgacgaggcgcgcggccgcgtcgagaacatccaggagttcttgggcgttgtggacgaatataccgatacgcacgacgagggcgatgccgaatacgctgctcccaccgcaggcggccaggcgcttgccgaggcgaatgctgcgggcgcgctcgaggccgtcgtctcggacgaaagcggggatctgcagttgtccatcggcatcgggcagggcgaggatgcccccgttcgcgtgctttccgccaactcgcttgccgacttcatcgaatgggtgacgttgcgaacggatctcgacaccatgtcggaggacggcacggcggtcacgctcatgacggtgcactcgtcgaagggcctcgagttcgactgcgtgttcgtgggtggcatggaagagacgcttttcccccacatgaactcggtgagcgatccgagcggcatagaggaggagcgccggctcgcctatgtggccatcacgcgcgcacgcaagaagctctacctcacgtgcgcttatgcgcgtcagatattcggccagacgcaggcgaaccccacttcgcgcttcatcgccgagattccgagcgagctgcgtcagacgacgggtctcggttcgtcgggattcgagggtacgggctgggagaagcggggcagccgcaagggcatcgccggatcgggaaccgaggcgggcggtgggcgcgtattcggccaatcgagcgcttcgggtccgtcgaaccgcgcgacgcgaagctcgtattcgggattcgtccgcgatacgggcaagaaggccgctgcgggcatggcgtttgcggtgggcgataccgtcgatcacaagacgttcggccgcggtaaagtcgtgaaagtcgacggcgacacgcttcacatcaggttcgcgaagaccggtgccaccaagaagcttttgaaggattatgcgcccatcgtaaagatagggtagggtgcgggcgagcggtattgcatcatcggctgcgtgaactgccggcggccaatcgaagggaacgccccgcaccagtcgatgcggggcgttcttgctgtcgggcaatctagctgttgccgacagggcgaaagtgccgcctagatgcctgcggctgcattttctcctgcaagcttgccgaacgtgagtgcgcatgcgaggctgtggccgccaacggttacggggtactcgaccaggtagcgtccgccttgggtattgcctgcgacgtacaggcccttgatgggatctccgttctcgtcgagcggatgcaggtcggtatcgcattcgagtccgcccatgagcacgagcatgcctgcggaatcgaatcgacaggcgtagaagggcggcgtgtcgacggggaacatgcggctgccgattttgccgtagtcttcgtcgacgcctttcgcggcgagttcgttgtatcgttcgatggacgccttcacgttctcaaccggaaggcccattccctcggccagttcctcgatcgtgtcggctttcagggtgacggcgctctccaccatttcatcggtggtatatccgagggcaaacccttcgagaacggttttgtattgatctttttcatcgtcggagatgtagtagttgacgaacccgtgtccggttccctgcgctgccaactgcgttttccagttggcgtcgaatacctgccacgatttagtgccgagggctgcaagctcgggatcaggggagacgggttggcgggatagctggtcggcgatattctgaccggggatatcctcgttcatgaaccgattgccttccatgttgagctgcaggaaggcatcgacgcccaacgcgccgcccatatgatgggtcatcggcgcatagggcccgagctccatgtgcgcccctgcccatatccccatacgctgcccgtcgccggtattgcagaaatccccgttcacgtcgacttcgctgtagaacgaggcgaattcgtcggcctggggggcatagtagtggcgcatctccttgttgccgcccatgtctcccgtgcagaggcagaccgcttttgcgttgatgcgcgtatacgcctctcctttggcgtcgtgcacgtaggcgcccgtaacggcaccggtcgactcgtcgacgatgagttgctcggcgaaggttccgaacaggaactctgcgccagcggcgagcgctttatcccggcagttctcacagccccattgcatattgggattgaggttgatggtgccgtggaagaacggatagaactccgttttgtagtcgtagccttcaagcgggggccagaagatggggcgaagaaaattcgggttgtcggtagttttgttgtcggcggttttcgctacgagctcgtagtcggctccttcgacgaaccagtcgaaggcttcgcccgaatggtcgtaccagtagttgaggaaatcagggttgggacggtagcacatgtctttcatgagctgattgactatatcggctttcggtgcccactcgatgccgatgctcttttgaatttcggaattgacgacgccgaatgctccagccatgccgacgacgccgatatcgtcctgcctttcaacgccgatgacgcgggcacctgcttcggcggcggcgcgcgatgccgctatgcccgccaatccgagtccgagcacgagcacgtcgcaatccttctcttcggcaatatttgcgggaacttcgggcttggcgagaaacggcggcgtgtattcggacggattggccgctgtcgaaccgacggtttcggtcgccgcgtttccttgggcggtcttatcggttggagcacagccagcaagtcctgcactggctgccactgcagctgctgcgcccagtccgatgaaggaacgacgcgacagttcgatgcggtttgttttcatgatgccctccttggtttccgttttgcttgcttgcggcccactcaatgcgaccgcaaaccgaacggtacctcctcggtgcttccgaaaacctcctccgaaggcgggtgatttttgcaaaagtgctggtctaagccacctgaaacgggtgatatagaagcgagagggagataagacgattcccgttcgctcttcggcgggtatactgtggaaaaacaaggaaggggactatggagcgcttgcatacaaacgtgcgaaacgttgcttttcgggatgctttatgttttgggggatacgcgctgtaccttgttttctcgtatatggctttccattcttttacgctgttcgcccctgccgccgccctcgatgccgtttcgcagacgctttttctcacgactgtccttggtgcgaggatatgcgtttttgcggccatcgccttcttttcgttgcgcagcacgggtcccgatacgcttgtttcggtgctcgttgcctgcggagtggccttgttcggctttctggtctgcgggatggcgctgcagttttccgctgatgtggaattcagccgcattctaccctggttgatgttcggcggcgtatgcctcggcgcaggcgatgccctcatggttcttttgtgggcacggttctgcaagacctttacgctgcggagcgtttaccttttcgtcctgttcagcaacatggcgagtttggtgatctatttccttatgacgcttctgcctcccgctttggtcgtgccggctactgcggtgctctttgttgtttcgtcggcgtgcgtgaagaaatcgatttcgattcgcgttccgtcggcgagcgaatactcgcttcccgttgccaaaagcgccgcgtctcgcctatggcgtccggtgttcggcacgatggtgttttgctttatgagcgggatgatgatgcagatatcgggccaacaggagttgccgctctcgacggtgcaggagacttccatcgtatcgagcgggatagtcgtggcgattcttcttgttcctgcactggttgtttcgaaaccgccgaacctgagccgcctctacaagatggctttgccgctttccgcagcgggctttcttctcttgccgatactctggaacgcggcaggggggatcgtcaatgcgttcgcccagcttggctcgatggttgctggcattatcctgtggtgcatgctttccgatatggcgcgagacacccggttgccttcgccgctcgtgttcgccgtcgccttggcatgcacgaatgccgctcagctgctcggcgtgctcgtcgggtttttcaatgcgtcgagcattacctcaggtggaatcatgctgacggtaatagcgctcgtttcgctgtacttgctttccatgctttcgttgtttctgttcaaagacaaagggcttgctttggcggagcctgcgatgcccgctccccagttggtcgtgcgcgaggagcagtggttttccgctcgctgcgaagagatcgcgtcaactcatcagctgacggccagggagcaggagatattcgtactccttgcccaaggtcgcacggttcacggcatctcggagaagctctacgtgtcggagaacacggtcaagtcgcatatcaagagcatctaccagaagctcggaattcaccttcgctccgaactgatcgagctcgtcaaccatgttgatgacgagctcgaaaaacaagtgaagcagattcgctgaggagtgctcccgcacccctacgaacagctcatccccggcgtgcacgaggcgcagaacccgcaagcggcgggtgttgcggctatgcctccgagcgcgctttcgcgcagttcgaagggaagcgagcgtcccactttgcgcattgcttcgaccgtctggtcgaaatcgacgaggttgccgattcccgcaagtgcgatctgcgcgcttacgagcgcggttgcggcgcccgccgcgttgcgtttctggcagggaacttccacaagccctgcgatggggtcgcatacgaggcccatcatgttggtgagcgcgttgcttgcggcggcgaagcactgcgcgggggttcctcctgcaagttcgacggccgccgccgcagccatagcagccgccgatccgatttcggcctgacagcccccttcggcgccggagacggtggcgttgcgcgtgatgaggtatccgatggcgccggcgcaggcgagcccccgcttcagatcgtcgtcgctgaaccccctgctatcctgcagggctaagagcacgccggggatcacgcccgccgagcccgcagtgggagctgcggcgatgcgccccatcgaggcgttcgtttcgagcacggccatcgaataggcgatggcgagcgagagctgatcgtcgcagaggtttcctccgagcttcctcaaagcagagagcttcagggcttcgcccccgatcaatccccccatcgagggaaggggctcttcgagggggcgggttgccgattgcctcataacggcaagcgcttcgtcgaggtagccgtcggtgtcgcttgcgtagccgaggctggccgcaagcgcgtcctctcgctccaagaacgcttcggagatggacatgccgcttctctcgcagaaagcgagcatcgcggcgccatgggggaagtcgagttcgtcgaagcgtgcctgagccgcttcgacgtcggctgcatcgtctttcgagacgccggttgcgctgtcaccggggatgatgcgcacgtcgcggattgcgggatgcgcttcgatggccgttttgatttcgggacagaccgcctggtcggtttccaggatggtgtaggccgcatcgcccttgcgttcccggtacatgcgggttgtggcgatgttcacgccccagtcgctgatgcttttcgcgatgtgtgcgagcacgcccgcttcgtcgcgttgccggatcacgatgctcgtcttctcgcccgtcacctcaacgtctatgccgtcgattcggcgaatgaccgcagcgcctccgccgatgctctcgccgcggatgctcatctcgctgccatccgcatcgacgatgcggatgtcgacggtgttggggtggtcgtattcggcatcgagttcgggggtgaacgagaacgccagaccggcctcgcgggcaagctggaacgaatcgcgtatgcgcagatcgtcggtatcgagcccgagcatgcccccgacgagcgccttgtcggtgccgtgcccgacgagcgtgtgggcaaacgatccgagcagcgagaactcgacggtgcggggttcggccaggcaaagcctgcgcgccatgtaggcgatgcgcagcgcgcccgcggtatgggaactcgacggtccgatcatgatggggccgatgatgtcgcgtatgctcaaggtgtccattgaggcctccttggaagtggtgtacgaatacgcggtcatcgtatcacgaccgcaggcgtctccatcgaatcgtaacgccgctcggcaagcggatacccaggcgcgtgcagcggtgcggtgcacggtgctgcgaaaccgcgtccgccccgagccgcgatgggctgttggcgggcggcgggcggaatcgatttatgatgaatgcttcacatggcgcgcattttcacgtgaaccagctacaatggctaacgtttcgcccgagggcggacgtgcagaaaacccgatacatctaacgcaaggagcacagagcatgacggcacctatcgtcatcgtaggacaccgaaaccccgacaacgattcgatcagcgcagcggtcggctacgcgtatctgaaaaacgagctggccaagcgggaagcggaacgatccggcaaggcgccggcggagtacgtgcccatgcgtcttggccccatgccccccgaaagcgcttgggtgctcgaggagaacggcatcgcggctcccgcgatactgagccatatccatgcgcgcgtgctcgacgtgatgacgccgaaccccatctccattccgcgcaccgcaacgctgctcgaggcggggcgcctgctgcgtaagcacaacatccgctcgctcgtcgtggtgaacgacgatgaaacctatcacggcctcatcaccacgcgcatgatcgccgagcgctacatttcggccaccgatgcgcttgaggacgacggttccaacagcatggcggtcgcaggcgaccttatcgcttcgctcggccagaaggtcgatgagatgaccgagaccgatgtgcttgtgctcgataaagagggcctgctgaacgaagccgttgaagacctcatggcaagcgctttgcgcgaggcggtcgtgctcgacgacgacggctactgcatcggcatcgtcacccgctccgacgtggccacgcgcccgaggcgcaaggccatcctcgtcgaccacaacgaaacgcgccaggccgtgcacggcatcgaggaagccgatgtcgtcgagatcgtcgaccatcaccgcatcggcgatgtgtccaccacgaaccccatccagttcttgaacctgcccgtgggctcgacggctaccatcgtcgccatggagttcgagcgccacggcgttgagatcccaaagtcgattgcggcggttctcctttccgccgtcatgaccgataccgttatcctcaaatcgcctacggcgacgcatttcgatcgcgaacaggccgaacgcctcggcgctctggcgggcgtcgatccgaccgatttcggccttgccgtattcaagtgccgtggcggcgaggacgacctgccggtcgacaagctcgtcggggccgactccaaggaattccagctcggcgattccaccgtgctcatcgcgcagcacgagacggtcgatctgcccgctgtcatggagcgtgaggatgagatccgcgcttacatgcgccggcttaaagacgataacaaatacgagttcgtgctgttcatggtgaccgacatcatggcagagggcagccagttcctgtgcgagggcaaccgtcgcatcgtggatcgggtgttcaacatcaagtgcacgggcgtgggcggcacgtggatgccgggcatcctgagtcgtaagaagcaggttgcagcccgcattctcggctcgtaggttgttgcgcgccttcgggccgtgagccggtgcgcattctcggttcgcagaccgattcgcaggcagcatgctcaagcgggcggtgcgcttcaggcgcgtcgcccgctttctttctcccagacttttccgatatgttcgatgaggaactcctcgaaccgtttcgcttccggggattgctcgccgtccgaatccacgatggcgacggttcgcgtaaaacgggcatcggcgagggcgacgagatccgcttcgtaatccgaaaggtcgccccagctgtattcgggccagaacccgatgccgaggccgagtccgatcatcttcttcacaaccgaaggattgtcgctttcgaaggcgatgtgcggcgtaaagcccgcgagggcgcagagctcgtcgcaaagcgtcctgaaggccttcgatcccgctaggcagatgaagcggctttcgaccagatcgttcagatcgacgggctcggggggacgcgaacctcggctcgccatggcgattccgatgcgttcggtgaacatcgcttcaacggcggcgtcgggcggtgcagcgctcagcccgtgaaacgatccgtcggaagcgagggccgtcacgtggatatcgcacaaaggctcgtgttcgttctggctgatgaggaaacgggtatcgggatgctcggcgctgtagagcgcgatcgcgtcgacgacgatgcccgaagcggcctgaatatcgatgcgcaccgtgcgccgttcgctttccgagaaagcggcgatatcgcgggcgatgccgtcgatgctttcgagggcgggcgcgagcctgtctttgaggtaggatcctgcgggggtgagtctgatgttgcggcccgtatgctcgaacagcttcactccgagctcgcgttcgagacggcggattgcctgagagagcgcgggctgcgccacgtggagctttttggcgctgttcgttacgtgttggctttcggctacttcgagaaaatatttcagctgcagcagttccatgggcaggcctccgcttattgataatgtataagttattataacaatagaaacaatatattagacggtattgaaagaaaagcgtagcgtaatgcatgttggctttcaatcgatatggccgcgcatcggtgcgtccactggcaggagatgattcttcgtggctgaattattcgaagcggcaatgctcgtttgcttcggactctcatggcctctcaatgcgctcaaggcgtacaaagcgggtacggcaaagggaacgagctggcagttcatcgggttgatcacgatcgggtatgcggcgggcatcgcagccaagttcgcgtcggcttcgatcaactgggtgctcgccgtatatttcatcaacgtgatctgcctcggcgccaattggctcgtgtatttcaggaatcgcaagctcgatgctgccgccgatgcggatgccgctcgtgcgcttgccgaagagcaagcgtgccgcatgcgcgtcgaagaggcgcttgaagagggctttgctggtggcgtgcgcgccgctacgcgcggcatctagacatctaggcagttgtctagccgcgcccgcgtggctgccggctgcggctgcggctccgcgcgcaacatcgaagccgtccagtcgttccccttacgagcttctgccccaggcatcgttcggcccgttgtttggcgaccttgcgatgggggcaatcgggcatgcgcctgggcgccgtacttgggtataatggcggcatgactctcatccgaaccgatacaccgaatgctgcggcagccgacgaggctgcgttcgaatacgctctttgcgccttctcggaaggcgcgcggcccgttgtcatcgtgccctcctacgacgaggcggtccgcctcaagaaagcctgggccgagcgcatgtcgttcggcatcgacgtggttacgctttcgtcgtgggcagccgacctgtgggagctgttcggcgatgggcgcacgtttgtggattccgtgcaacgcgagctcattgcggcggcagccttgcgcagttattgcgagcaaaaccccgaatgccttttgcagcctaccccgggaacgcgcgcgttcatcgcgcgcgttgcgcgcgaggcgctgccgaaggcgacgggcgagcacgagctggggcggggcgagcgcgaggcggtcgaagtgctcgagcggtatcgcgagatcgcggcttcggcgggcctggtcgaacaatccgaagccctcgcgctgcttgcggacgcttccgtgcttgcgcggtaccgtcctgctgccgtagggttcgaagccgatgcgttcacggctgtcgagcgggattttctttcgcaggcgggaacggttgcgttcgtcaacgagagaagcgaagagcccttcggaaggcgtgcgcccgagcttgcctcgctgcttgcagcgctcttcgaacccgatgaggagcaccccgtcacagcaaccggtgcggtgcggttcgtgctgccttcgggacgctacgctgagccccgattgctgtgcgacgccgtcgaagccgtccgatccgacgatcccgatgcgtcgatcacggtggcggcgcgcgatgcctttgcctgcttcgaggagctcgcgccgaggcttgccgagcgcggcatcgcggccgaagtacgcggcagcgttttgttcgctgcgaccgaattcggctcatcttggctcgctttgctcgaaacgctgttcggggaaaccccgcttctttcccgtgctgcggcggatttcgcgatcggcgcctattcgggcgtcggcgtgcgcggcgcatactggatggatgcgcgatggagggcgaaccgctccgtcgatcgcgattccatcctgaccgatcttgccggaagcgccgatcatgggctcaacggcttggtgggatccctcgaaagcggccgggtggaagaggcgttcgatatcctgcaagcccatatgctcaagcaggcgggatggcccgagggctaccgcgatcggcagatgtcggcgctcgctttggcgcgcaccgtcttcgaaacggcgcttgcgctcggggcctgcacggaggattaccgctcggtgctcgaggagcagagcctgttcgtgcggaccgcaaccgatccggcggccaaccgggcgggcggcgcgaacggcttcccgaaaggcgagcgcgacgatgcggacgccggcgcaccacccgttctgatcgtcgatctcgagggggctgcggctctgggcgcggcgtcctgcgattgcctgctcgtcaccgatctgacggcggcggcgtaccctgtgcgcgatgacggcggtgccgtctcgtcgctgctcgagaagctcgatgcggcggtcgagcgcgacgggctctcttgcgtgcgcgcaacgttcgccgatgcgctttcggtgccgacgaggctgctcgtgctgtcgcgcccgctcaacaacccggcaggtgacgaggaacgccctgcggtcgtgttcgaggacgtgatcgactgctatcgctccgaactgcagaaccccggcgagaccgacaaaaggacgggtcttaccgcggagcttcttccttacgcgagcaccctcggcgaacagggcgcctacgagaacctttcattcgaaggaaggccccagaagatggcggccgagattcccgttatgcccaccgggttcgtcacgcccgccgcgcgcgacaagatccttctgccccagcaatggggcggggtggtaagcgaaggctacagcctctctccttcggcgatagaaagctacctcgagtgtccctacaagtggttcgcccatcgcaggcttcggctcgaagagctcgatgcggggttcgggggccgcgagttcggcttgttcgcccaccgtgtgctggagcatttctacgctcgattcaggtgcgaagtcgctccgaaagtaacttccgacacgctgccgcaggcgcgtcgcatactcgagcgcgtgttcgatgagcagctggcctacgacgcgacgctcgtcggcgattcgacggcgctcgttgcgctcgacgatctggagcggcgcgaagttgacgatctcaagcgcaagctcatcggctatcttgatcgggaggcgcgccttttgcctggcttcgctccgctcgacggcgaggtgagcttcggtcggaagcagggagctttcgaatatgcgggcttcaaggtgaacggaacgatcgatcgcgtcgacgtggacgggtacggccgtgcggtggtcgtcgactacaagggcgccgtgggcaaatcctatgcgctgaaggagaaggcggatgcccccttcgcgctgccccgcaaggtgcagacgctcatctacgcgcaggccgtgcgcaagaccatgggtctcgaaccggcaggcgcgctctatctttcgtatggcaaagacgggggcatcgccggatcgttcgaccatgcgctgctcgatcctgggaaggatctgctcggcatcgatgccgccacgtgcggaacgctcggttttgccgagctgctcgatcgcgtcgaggaggccgtggccgcccgcctcgaatcgctgcttgccggcgatattcccgcatgcccgcgcgacgaagacgcctgcacgtactgcccggttaccgtctgcagcgtgcgcgatgcgctgcagcgccgtagcgaaggggatgagtgatgggttcggtatcctacacgcatgagcagaagctctgcatcgaacagcttgtcgggccggtcgatatctcggcaggtgccgggtcgggaaagacgttcacgctctcgcagcgcatcgcctacgccctctcgcctgaatcgggctcgggcatcgacgacatcgaccaggtgctcgccatcaccttcaccgacaaggccgcatccgaaatcaaaagccgcgtgcgatcgactctgcgtgcgagcggcctgttcgagcccgcgctcaaggttgattccgcgtggatatcgaccatccacggcatgtgctcgcgaatactgcgcgcccatgcgctcgaactcggcctcgatcccggattcgcggtcatcggcgacaaggatcgccaggagatgctcgacgccgccgtgaacgaggtgatcggggaggattccgaaatcgtgagccgctccgaattcgatgcgctgttcgaggcgtttcccgcgcggagcagcgggttcggaggatcgtcgatatcgtcgatggttgaagagctcatcgcgaaggcggcgggcatggtgagagggttcgacgggttcgagacgggacccgatccggcatcgcctacggagttggcgaagcggcttcttattgcatacgaagaggtgcttgcctcttacgaaggcgccaagcagacggcttccctcgagaagaaccgtgcatttgcgctcgatgccgcccaggccttgcaggaattcctcgaatcgggcgatgaaacgctcgacggctttattgccgtactcgatgcatgcgaattcctcggcaagcgcgggtgccctgcggaggaaaccgagtactaccagaacgttcacgcgggcgttgcgcaagaggcattcctcgcgaaggcgcgcccccttctggacgatttgctcgcgctcgcctggcgagcgcagggcgtttacgaggcgagcaagcgctcgcgcggtgtgctcgacaacgacgatctgctcaaacttgcgctcgatgcgctctcccgcgaacggatcgcgcgcgaataccgggaccgctttcggcttgtgatggtcgatgagtttcaggacacgagccagctgcaaatcgagatcgtccgccatctggcgggcgagggtctgcgctacctgtgcactgtcggcgatgcccagcagagcatctaccggttccgcggtgccgacgtgaacgtgtacaaggcgtttcgcgcggggctggaaaccgacgaggtgcgcgccggcggcgggtcgccgacgctgctcaagctgtcccgcaacttcagaagccatgccgacgtgctcgcgtttgtgcgcgccgtctgctcccaagaccaggtgttcggagaggatttcctcgatttgacggcggtatacgacggaagcggctatcgctgcgcgaagccgcgcatccagcttgtggccgctacgatcccccagggtctgccgggtaagaccgccgacctcgttgaggcggaggcgcgtgcgatcgcgcgctacttccgcgagatgcacgaggcgggccatcccctttccgacatggcggtgctgctcggccgcatggcgttcgccgaagcgtacgcgcaggccatacgcgacgagggtttcccgtgcatcatcgccggcggctcgcttttccataggtcccccgaagtgaaggttgtcgagcgactgcttcgcgtgcttgccgatatgggtgatacccaggcgctcttcgaggtgctgaccagccatatgttcgagctttcggccgacgatatgctcgagctcgcaacgggtttcgacgaggcgaacggcattcccatcaagcgcgatctcagcaaggggttcgctgccctgtccgattgcgccgatgaactgtcgccaggtttgcgccatgcggtgctgctcatgcagaaagcgcagatggagatccgttacaaaccgccctcgagggcgcttgcgaacgtgctgctcgattcggggtggatcgcgcgcctcgaggctcagggggccgagggttcggcgcgcatcgcaaacgtgctcaaggccgtgcggttcgtcgaatcgatggagcgcgacaagggcttcggcatttcccgctgctctgcggagttctccgcgatgatcgccgccggcatgaaggaggcgcccggagcgctttcggccgatgggcaagaggccgtgaagatcatgaccatccatgcttcgaaggggctggagtttcccgtcgtggcgctcgcccggtttgcgaagggtccctcgggtccctcgggaaagctcgttgccgaaacgatgggaaacagcacgtatctctcgcttgcagcgccctcttcgatgcccgtcaaaggatcgctttcagccaaggcgcagggaaagccgtacgcggctcccctaggggcggatcctcgcgcggcaacggggctgctcgactatcacgcctcgctcaagcgggtttcgcgcatcgaggaggaggccgaggaacgccgcctgttctatgtgggcgcaacgcgcgccaaggaggcgctttgcgtggtgatgggcatcaaggagcagaaaaccgatccgtacaaagcctatcgcggcgccatcgacgatatccgttcggcgctctgcggcgaagggctgttcccgtccgagagcatttctttcgagtacggtggaagcgagcctgccgagttcgtgcgggttatggcggtttccgaaagcgagcgggaggccgaggatccgacatgccggcaagcggggacgtgcgccgattcggaggagctgggagtggtgagcatcccggacatcgagccgttctcgctgctcgaaacgcgctcgacttcccgggaggatacggggctcttctcgtattcgtcgatcgccgaaacgcacgatgcggcttctgccgagctctcgtcggcatccgggacgtttgcatccgatgccgataaagccaccgatttgggttctgccttccatcggctcgcccagctcgctgccatgcgttcgatcgattttgcccgatcgcgcatgggcgcggtggcggcggcgtacggcatcaaggatgccgaacggctgcaccgtgccgtggatcgctggttctcgtcgcaggtttgcgcaaaagcgctcggcatgcgaagccatgaagccgaggttccgttttgcgtggcggtcgcaggtgcggggtgcctcgagggcgagatcgatcttttgtgcaccgatgacgccgcccgcgctttcgtcgtcgattacaaaacgggcggaaacgatgccgaaaccgatgagcagctgcacgaaaagcacctgttgcaggcgcagtgctatgcgtatgccgtgttgaaccagggcttcgaatcggtcgagttcgcgttcgtccgcgttgagcgggatgatccttcgggcggcgataccctgcaggcggtgccgtatcggttcgagcagagtgacattgcgatgctcggcgaggtcattgccgagcgataccgggcatcgcaggggtgatgcggcaagaaggggtgcggcatgcagcgagcctttacggttgatctttgaaagcgaacgcgccccgcaagaaacgggacgcgtgttgttcgtgcaatcgcctatcccggcaacacgtcttcgagcgggctctttggtacgcggtgcactcggtccccatcgcttttcacgacaagcagatcatgcgaaacgcggtctgcttcatggaatcggcggcagcttcggctcgctgctgcgatgtctttgagcatgagggcttcaatccttcggctttgactataatgaagcgaaaggaacggcggcgcaaggcaggctgaaaagcgtttctcggctgttctactcgtacggtaccgagggcggcccgtgcgtcgattgcagctgcttgcatgcgccgaaacacgacagactaaggaacgaagcatatgaacgcaacctcatcccattcccgcttgctcgatacgtttttcgaactcgtccgcatcgacagtccctcgcgtcatgaagcggagatggccgcatactgcaaaggccgcctcgaagatctcggctttgccgtgcgcatcgatgatacgaaggagtcgacaggctcggataccggaaacgttatcgcccatctgcccggcaccgcatcgggccatatcgcgctttcggcacacatggattgcgtgagcccgtgctgcggtgtagagccgatcgtcgaggggggcgtgtccgttctgcgggcgacaccgtgctcggcgccgatgacaaggcgggcatcgctgccatactcgaagcgctcgaaacggttgttgcagacgggagaccccgccctgatatcacggtcgtgttcaccgtctgcgaagagttgagccttctcggcgccggagcgctcgaccccgatctgttcgacgggacggtgccgtgcttcgtgttcgatgccgatggtgcgcctgggtcgatcgtgctcggggctccgtaccactacacgctcaatgcggctttcatcggcaaggcggcacatgcgggagtcgaacccgagtgcggcgcgtcggctatacagatggctgcggcggcggtgtcggccatggagctcggccaactcgacgaatgcacgacggcgaacatcggcatggtggaaggcgggcgcgaagtcaacatcgttcctgatcgctgcacgctttcgggggagtgccgatcgttgtacgaagatcgcgtgaacgcgcagcgcgaccgcatgaccgaagcgcttgccgacgctgtcgaccgcttcggcggttcggtcgatatcgactggcgcgaagattacccaggcgtgctgttcgacgaagccgatccgatcgtcgagaagctcttctcggccgctcgtgcagcgggcctcgaaccgaggacgacggtgtcgggcgggggcgccgatgccaatctgctcgataccaagggcgcgaaagccgtcacacttggtatcggcatgacggctttccattcgttcgacgaacatatcgccatagccgacatcgagggtaccgagcgcttcgtagaggcgatcatcgccgaattttgcgggtaaacggctgatcggttcttcccaaaagttatccttataatacttttagcctcatcgcttacggcccttgccctgagcgctgccttcgttcggaagcccgtagtctgggtcattctcagctgtgcagccgcttttctctgttatctcgttctcgttcgcattccgactgctcgcgcggagcgcgcgagcttcggctgcgaagctgaatagcggacggctcggaatcaggcttcgacggcttccgctgaaggctcttccgcgctcaaagcagccagccaaagatctttctgggctgcgaactcgcggtatgcgatcggctttgcagcctcggcgattcccgtgcgcttggccttcgcgcagagcgacatggcttggcggtagtcgagcacgtcggcttgcgcagggcctccggtatcgatgatctcctgcaagaacgcctttgccgcctcgatctgctcgggccgttcggggtcgatttcgacgatgcgatacgtttcggcgctcccgctgggatagtagcagatgaacgtatgggcgaaccgtccgatcgggcctgatgaagtcgagcgcgaaagccgtgcttcgacggagcggcggctgacgagtgttctgctgcccgcgcgcttgccggcgagcacgccgttggcgaccatggcgttcactcggtatcgactgataccgagcatttctcccgcctcgtcggtggaaagaaactcgtcgccttcctcgtcgtcgactgggtttgcgatcgccatcgctcccttggtgatgggcggagcgagttcgatgcggcgtttggcttcgtcgagcgtatcgaaggttctgggttcgagccgggggtaatggatctcgaatcgcccgtcatcggtctcttcgacgtagccacctggaatgggcgtatcgttgatcgacacggtccagcggcgaggcgcgccgcttgaggtatcgctctcgtgccatgttctgatctggcgtgtcatgggatcctcctgtggatgttgttctgggtcggggttttcgcgtagctcgggcaggtggggaagcgcccttcgaactgcatttcgatggcatctatcatctcgtattggccgaggtcctcaaggttttcgcgcgttatccatccgtatccgataagctcatcggccagatcgcggcaataggtgcaagcgtggcattgccggttgcatgtcgaagtacgtttgaacagcgatgtcctgtcgatcgccttgttgtcgatatgggcgctgtactcgatgccgtagtagccgatgctgctgcacaggatgtcgaagaggttgccgtcgtaagattcttcgaggtaggcttgtgcgcaccgcaacactttgtgcggcaacatgtcgcgcccgactatcttgaagaagccggtgaccttctcgtaacgatgcagatcttccggcctcacccagttcgacttgaatacctggcctggatcgtttctgatgatgtcgccgcatgcgaacgagaatgcggtcccttccgagaccgattccttcgacttgtgcgagatatagttcatatggaagattctatacgggcacttgtcgaggcagccttcgttggccatgagtttgatctcgactccgagctgttcggtgatctgcttgagcagcttgaggttcttgttgatcgacgtatcgacggtcatcgtgttcgcacctgctcgagcgaacgcttcggcacgcgagaagcaatcgatggcggagagcaccgaagcgctgatttcgagttccgggcatgcctcgcgcgctttctcgatgagaaacgggttcgcaagcgtgaccgcttcgactccgtgttcttcatgcatgcggcgaatgaacccgatctgcctggccacggtttcttcctcgtaccagtctgctccgtcgcacgtcgagttcatcgtgatgtcgacgcggatattcgctgcatggatgcgcgtgaccgttgcgacgaattcctcttcggtcagttcgtttccgacgcggcccgagccggtgatcgactgcggtgcactgaggtatatttcgcgaatgctgttgccgccgtgcccttgcagcgctatgagcgcgtcgagcgttcgggcatccccgttgaaggggatggagaattcgagattcggcatgttcggctccctccgtattgccaagcatcgatgcttctgcgggttcgtgttgccgcgggcccgcagaagcggttgcgttcgctgcaggctcttcgcctgcagcgaacttagaagcttaggccggcgatgcagcgtgcgtcggcccaagcacgtgcgggtttatctaggcgctcgctgttgcatcccatgcttcaagcgctgcggcatgtctgccggcaatgcgtccgacgcaccagttttcggagccgttgccgccggtgattgcataggtgtgaccgttcatgttcccgaacgaaccggcggaatataggcgcggaatcggcttgccatcggggtcgacgatgttggcgttctcgttgcgccgggcgccgccgatcgtgttgcagatgccaggatagagggggatcgcatagaacggacccgtttcgatcttggccatctccttgcgtccgaagtcgtcgtctgcaccggtatcgcacagttcgttccagcgctcgatcgacgccttgagcttttcggcgtccatcttgtcatcccatttgctggcggcgatgttggctgcaagctcctcgatcgtttcaccggatgttatccatcctcgctcgagttcccattggttgtcggccgaccaacctgcccaaccgccgagttcgggatcaaggtcttcggtcatgtagccgatgcccatgccgccgttctcggtagcggcgccgccgaccattccgccccagctgccgcccgtaaacgacgtgtgatcgaagatgtaccacgaggggatacggtcgaagtcgcagatctcctcgtcgaagttcgcgtagggcttccagccgccgtgagggctgaacacctcctcgttgccccagcgttccccgagtctgctcaccttgatgtagtttggagtggggctctccaccgatacgccaccgggaacgatttccggatcgtcgaaccaggcatcgtcgccgccgcagacctgctgcatgtgccagagatcggcaccgaccttctgggccattttcacgccgtcgccggtgttgtacttccagccgtaaaagcccttcatgggatagcacttaaggtacttttcctgcatttcgaagttgaattcgaacccgcccgtggtgaggataacgcccttgttcgccttaactgcttttttctccccatcatcgccgatgagcgtgtagcagccgatgatctctttagtctcggggttttggatgagctcctcatcgtggcagtcgaacacgacttcgatgccgcgatcctggcgatgctggtccatagcctcgaagaatccttttccgtagccggtacccgatcctacgtacatctcctcgaagcccgtgaatatgtcgtattcggcacgcggcgtctcgccgagcgtgtattcgaggccgtattcgtcggcgtagtcggggttcagcacggcttcgtcggcccaggcctgacagacttccatcggcgtctggccgtgaaacgcctcgaacgcgaattgggcggcggcgtcggcatcgtggggagcggtccattgccccatgttgatcgatgaagagccgccgccgcggaacggcgccttctcgagatacatcacctgagcgccttcgtcgaaggccgtgatgccggcccagagacctgcgccgccatagccgatgacgagtacgtcggtctcgtagtcccatgctgcaggcatccagctcggcgttgcctcttccgcctctgcggcgcagcctgaaagggcggcggcgcctgcgacgcctgcggccgcaagtgccgaccctttgaggaaattgcgcctcgagattccttctttcatgtgttcctccttgttgcatcgattgcttgtcgcccgccgcatggcggcgggagattaccgtaagtggatggctcgcaccgggttttcagtctgtcgagaatcggtcgggcgacacgggtctggcgcaccacgtgctactcatggcaggtattgcactcgtagacacccatgtgatgacagccttggcacgctttttgcgctgtatcggcgatgccgtcggaggcatgcatgtcgtggcagctgccgcagtctatggtttcgtggtcttcgttttctggaagggcgtgcgggttttccgtcgtgccgttcgaatcggtgaggactgtgcttgatgccgtcttctcggcaagcgattcgtagctgccgtggcaggcttgcgtgagacatgtcgactcgtccacttctgtcgatttgaggcgtttggcgaccttgtcgccgtacgccactccctcgtgaaccgagctcaacccgtcaacgtcgccgtgacagtcgatgcaggcaagggctgcatggtttgccgccgggtacgcggcatcgctcatcgaagtgccctccgtttcgtggcacacgctgcagtcggcatcggtcgagaaggtgaaatctccctgcaggacgggggtctttccgtcgcttgccgccgctgattcggatggctcctgcggtgcgcacccgtatacgcacagcgcaacgagagcgatcgccgcagcaaggagcgcgaaggccgaagccttggtttttatattggttgttcgttccatggatgtcccctcgtctgagtagtccgccacttcttccgctgtggccgcgggtttttacggcgcatcgaagttttgccgaaagcttcgggatatccatcatctgaaaccaatgcttcgccggtctttctcatatgattttcgaaaacgagtatcatctgtttcgtatgaagggccgatcacctggcaaaacgatgccttgtgtaaaactgcggtttacgtgattgttgctatactgggcagtgccgttaacggggaagcgcagcgggtggtgcggcgaggggagagacatggggaaagcgaacagcggaaaaacaggcggtgccgataccagacgagccgcaaagtcttctggcgccatggggaaggaagctcgcacgggggttgcggcgctgtgctgcaccgtcggcatgatcggttcgcaaacatggatgcccgcagtgggtttgttcgccgacatgtaccgcgcgggaagtttttcagtcggaaacggcgctccgctgtttctttcgtatctggttgccctggccttggttgcgtcgctgttcgcggtgcttcgtctcaagagcgcccccggaaagggcacgtacgcggcgttggtgggcgcgttgctttcatgcatcggcactgttttgcttttgctgttcgacgaggtggatcctcagaggatgggactcctgctttccctcacgggccttctgctcggatctggcaactgtctgatggtgatggcgtggtcttcgatgttcgcgaagctgcgcggaaaagctttgttctcgagcgcgctcggcgttgcggtgtgctgttgcgtccttgcgtcgttcgcgcagatggtcggagcgactgcgatactgcttgctgctacagcgggattgtcagccgtatcggcagcatgctatgtcgtgcttgccgttaaatccgaggttctcgcatacgacacgccgtccgcttctctcggctcggcttatgttcggattgggtgttcgctcggctgcttcggttttttgtttacgatgatgatcatgcaattcgctatcgctccccatgggcaagcgagtccgcatacgtggatgttcggctttgcgggaatcgcggcggcggcagccatccttgcagcgggtcgcattgcgcgcaagggatgggatttcgtgttcgcgtaccgcttcgtcgtcatccccgttctgatagcgtttttcccgttcgatccgggtagcgatttctcgctcaagttcgcgctttgtttttcgacgatggcgctgtggtgctttctgaccatcgttccgggggtgcttgggcaggcggctgcgacgcttcgtgtgcccgtgttcttcacggcgggcatcggcattggcgggttgtgcatcggagcggtcgtcggatacttcgttgcatggttcgtcgaattcctcgatccgacgccgaactactacatcaacgttaccgccatcatctcgatggccatcgggctcatcgggtcgaacatcgtgctgacgaaggggagtttgataagggcctacaggagggcgtcggccgcttcgggggattccgacgatgcggatgcgacaacgagcgagaaggtggctcgtgtcgtcgaagcatacggcctcacgaatcgggagtccgacgtgcttttgatactcgctcggggccatggtctcgcacgcgtgcaggaagatcttttcatatcggaaggcacagcgcttacccataagcgccatatctaccaaaagctggacgtgcattcgaaatccgagctcatcgatctggttgcttgcatcgacatcggagacgtcgacgaggactgaacatcgcatcgcaagcgatcgagcgcgttggatcgaacatgggtgcattgcgcgtccgctgtgctcgaaggcaggtgctttaccgccgtgcggaaaatgaagcgcatgcttcgcgctgatggcgccgaaccggaagcgggcgggtgccgtgcgttcggggtctgcatgggcgcgcattcggaacgtcgccgaatcgaccatcgtcgttcccgtcggtttcaacgaggctcgtcaggccaaggtgcgcttgtccgccaaagcgcaacgaaatgcttctcggtgcatgctgatttcttcaaaaaaccttttcaaaggtgttcgtgatgtgccgatgtatttgctcatcaggcataacgcgtaggctgtgttatggatatacccgggtgcgtggcgtttgacaagcctgttggcgggtgataaagttctcgttcgcgtctcgtaaggggcgcggtttttcgtgtgcgtaacagctgaacgcactcgaaaagttggaaagatgagactacctatatatacagtataggcggctcgaaacggaaaaggtagaaggagtacagctttgcctacaatcaaccagctggtccgcaagggccgcagcaagtcggccgagaagagcaagacgccggcactgaagggcaacccgcagaagcgcggcgtatgcacccgcgtgttcaccacgaccccgaaaaagccgaactcggctcttcgcaaggtctgccgtgttcgcctggtcaacggcatggaagtcaccgcgtacattcccggtgtcggccacaacctccaggagcactccatggtgcttttgcgcggcggccgtgttaaggacctccccggcgttcgctacaaggtcatccgcgccgcgctcgactgcgcagcggtggacaaccgcaagcaggcccgcagccgctatggcgccaagaggcccaagaactagtaatcgttaagtcgcgcgggccatacgggcctaatgggcgaaaagccccgaagcgcgcagacaggaaaaggagaaagaatgccgcgtcgtgcagcagcaatccgccgcgaagtgcagccggatgcaacgtacaacaaccgcttggtcacgcagctgatcaacaaagtcctactcgacggcaagaagtccgtcgccgagggcatcgtctacggtgccttcgatctcatcgagcagaagaccggcggcgatccgctggccgtgttcaagaaggccatggacaacgtgcgccccaccctcgaagtcaagccgaagcgtgtcggcggcgccacctaccaggtgccgatggaggtcaactcccgtcgcgccaccacgctcgcgatccgctggatcgtcgacttctcgcgcaagcgcaaggagcacaccatgaaagagcgcctcgccgctgagatcatggatgcttccgagaacaccggcgcttcggtcaagaagcgcgaggatctttacaaaatggccgagtccaaccgtgcattctcgcactatcgcttctaagaagggcggtatcgagaatggcaattttacctttgaaggatacgcgcaacatcggcatcatggcccatatcgacgctggtaagaccacgactaccgagcgcatcctttactacacgggcaagacccacaagatcggcgaggttcacgacggcgctgctaccatggactggatggtccaggagcaggagcgcggcgtaaccatcaccgctgccgccaccacgtgcttctggaagtatcccggaggcgccgacaacggcaaggaataccgtttccagattatcgacacgcccggccacgttgactttaccgccgaagtggagcgctcgctgcgcgtcctcgacggtgccgttgccgtgttcgacgcggttgccggcgtgcagccgcagtctgaaaccgtttggcgtcaggccagcaagtacggcgtgccccgcatcgcctacatcaacaagtacgaccgcgtgggtgccgacttcttcaacgccatccagacgatgaaggaccgcctgggcgcaccggccgttgccgcgcagatgcccatgggcgccgaggacaacttctggggcgtcatcgacctcgtgaccatgaccgcatgggacttcaaggccgatgataagggcatgacctatcccgaacccatggacgccattccggctgagttcgccgaagaggccgaaatgcgtcatcaggagcttctcgaggctgccgccgactgcgacgacgacctcatggagaaggttctcatggaggaagaggtcacggtcgacgagctgaaggccgccatccgcaagggcacgatcgcctgcaagatccaccctgttttcgtgggttcttcctacaagaacaagggcgtgcaggagctgctcgacgcggttgtcgattacatgccgagccccgtcgacattcctgccatcaagggcacgaaccccgacacgggcgaggaagacgagcgcccctccgacgtcaaggctcccttctcgtcgctggcgttcaagatcatgaccgacccgttcgtcggcaagctcacctacctccgcgtgtactcgggccagctcgattccggttcgtacgtgctcaacgcgagcaagggcaagaaagagcgtatcggccgcctgctgcagatgcattccaacaaccgcgtcgacatcgacgagtgcgccgctggcgacatcgttgcagtcgtcggcttgaaggacacctccacgggcgacaccctgtgcgatgagaagcatccgatcatcctcgagtccatggaattcgccgagccggttatagacatcgccgtcgagccgaagacgaaagccgagcaggacaagatgggcgttgcgcttcagaagctcgccgaagaagatccgaccttccgcgtttccaccaaccaggaaaccggccagactatcatcgccggcatgggcgagctccacttggagatcatcgtcgaccgcttgctgcgcgagttcaaagtcgaggcgaacgtcggcaagccgcaggttgcctatcgcgaaacggccaccaagccggttcagggcgccgagggcaagttcgtccgccagtccggcggccgcggccagtacggccatgcggtcatcaacctgattcctcaggagccgggagcgggctacgagttcgagaacaagatcgtgggcggcgttgttcccaaagagtacatcacgcctatcgacaagggcatccaggaagcgctcaactcgggcgttctggccgggtatcccgtcgtcgacatcaaggtcgagctcgtcgacggttcgtatcacgaggtcgactcgtccgaagctgcgttcaaggttgccggttccatggctatcaaggacgccttgaagaagtcgagccccgttatccttgagccgatgatgtcggttgaggtcgaaacgccggaagagtacatgggcgacgttatgggcaacctctcgagccgccgtggccagatccagggcatgggcgatcgcggcaacgcgaagaccatcaaggccaaggttcccttgagcgaaatgttcggttacgcaaccgaccttcgcagcggtacgcagggtcgtgcggtctacacgatgcagttcgactcctacgagccggttccgaagaacgttgcagaagaaatcatcagcaaggctggcggaaacgcgtaggcccgacggctcgcatttcgctcatgcataatggaggtaaaacaagtggctaatcaaaagattcgcatccgcttgaagggctatgaccacgagatcgtggatcagtccacgaagcttatcgtggacactgctcagaagacgggtgccaaggtttccggtcccatcccgctgccgaccgagcgcaacatgtactgcgtcgtgcgttcgccccacgtgaacaaggattcgcgcgagcagttcgagatgcgtacgcacaagcgtctgatcgacattctggagccgacccccaacacggtcgattccctgatgcgtctggaccttccggccggtgtcgacatcgagatcaagctgtaagggggcaaacgagaatgattactaccatctacggtaagaagctgggcatgacccagatcttcgccgaggacgaccgtgtgcttcccgtgacggtcatccaggcggagcccaacaaggtctgccaggtcaagaccgctgcgaccgacggatacgaagccgttcagctcggcttcggctccatcaaggagaagaaggtcaacaagcccatggcggggcatttcaagaagcagggcgcagagcctgcccgctacctgcgcgaggttcgcgtggacgctgccgccgactacaaggtgggcgacgaggtgacggttgccgacttcgccgaggcgaagaaggttcacgtgtccggcacgtcgaagggcaagggcttcgcgggcgttatgcgccgctacaatcacaagggcggccctggcggacacggttcccatttccaccgtgcccccggctcggtcggccagtgcgccacgccttcccgcgtgttcaagggcctgaggcttccgggccacatgggttgcgagaccgtcacgatcaagaaccttgacgtcgtgcgtatcgatgaagatcagaacctcatccttgtgaagggtgctgtaccgggcggcaagaacgccgtggtccgcatccgcatggcatagagtgcacggaaacttgaggagttaagacattatggcaagtattgaagttaagaatgtgagcggcaagaaggtcaagagcgccgacctgtccgcttccgtgttcggcatcgagccgaacgtgcatgccatgcacgaagttgtccgtgcccagcgcgcatcgtggcgcagcggcactcacaacacgctgacccgcggtcaggtgcgtggtggcggcaagaagccgtggcgccagaagggcaccggtcgcgcccgtcagggttccacccgctctccccagtgggcaggcggcggaaccgtgttcggcccccatccgcgttcctacgcgttcaaggtgccgaacaaggtcgtgaagctcgcgatgcgctctgcgctttccgcgaagcttgccgatggcgagctcatcgtgatcgaggagttcggtttcgagaagccctccaccaaagaggccgctgccgtcatcaaagcgctcggctgcgaaggccgcacgaccgtggttatcgccgacgacgatgtgaacgcgttcctctcgctgcggaaccttccgcgcgtgaacgtgatccccgttgccgaggcgaacacctacgaactgatcgacaacaaggcgctggtcttcacggccgccgctctggctcgcatcgaggaggtgctcgcataatgaaggatccccgcgaagtcatcatccgcccgatcatatcggagcatagctacgatatgatggaggacaactgctacaccttcgaggttgccaagaccgccaacaaggttgagatcgcccaggcgatcgaggcgatcttcaacgtgaaggttgtgaaggtcaacacgctgaacgtcaaagccaagccgaagcgcgttcgctatcagctcggcaagacccgcacgtggaagaaggccatggttacggtcaaggaaggcgactcgatcgagttgttcgcttcctaatctgccttccgctcgcaagggcggcacagggcttgctcgaagcatcgggactggactcgttagggtccagtccttttttctgcccgatggcgccgaagagcgccattgcaccgcgaggcttacgtttgctgccggcattagtactgaagtttcgctgtttcggcaaaaattagtactgttttatctacgctcggactctaattcatcccactggtggcatgtttttcgaaccgaaaagaggcatcatactcactgcgcgcatgatctccgttgtgtcgaacgcaaagcggatgccgtcccccgcggttgctttgcagtttgtcggcctaattacacgtcggaggcatgcgcgtttcttacgctttcggcgacaagcagaatgcggttccttcgattgagcgccgaggcgtctggatcgtagtcgatcaccgttacgggcatgcgggcaaagcgtttcctgagcccgtgaagcgcgccgcgcgattcgacgtggcctttcaagcatccgaagctctgcgcgtagatgacgtgatcgacgccagccgcctcgaacgccgccatctgatcgaggtaccggacgtcgtcgacgagcagcttgtcgggatcggggaggatggcctcgcatccgagggattcgacgaaatccgcgaggccctcgttcaaaggcgattcgaaaaccatgaacggattgccgatgatgccgatgcgcggcgcgaaaccctgcttgccggatcgcacggtgcgcgtccggggttccttttgcggggggcagccgggatgcgaatccgagggcttcgttccctcgtgtttccacgagggcccgcccgctcggcgcatcaggatgcgcacggcgaatcccaacggatccttcacgaggtcggggagggcatcgaacaggcacgccgtgcagccctcgggcacgatgacggtgtcgatgctcggatcggctcggcagattcggatgatgcggcccgcgacggctgcaaccgtcgagcagacgtcctggcttacttccctgcggccgatttcgatgtcttcgggttctattccgcccagctcgaccgtcttcgttcgggcgctcgaatcgcctgcggctttgcttccgcccgcgtttcggctgcggtcgcaagcggattgcaagggggaggggccggcggcttctttttgcggcgcaccccggcgctcctcgatcgaatcggcgagcgtgcgcaggcgaatgcggatgtgggccgtatcggaaatctcgtcgattttgagcgcggtgaaggaacgtcccgcagcttcgagatccttcttgacgtcgatgaggctgactgcatcgtaggcgcatccgaacgattgcaggcacaccatatcgaggtcgtcatgcgaggcaacgaaggcggatagccgatcgaggcgctttccctgcctccatttcgcttcgaatgcggcggacccgtccgccgcattcgaagcgaaaccatccgaggcggcgctttccgacgcgacggcagggggtgttcccaaggcggcccggaggcttttcctgcgtgcaagcctcccgaggccttcgggggcgagcaccgcaaaccccatcgacgagagcacgccgtcgatgccgtggcttatcgcgggatctgcatggtagggcctgccggcgagcacgatgccgtgcccgtgcgtcttctcgatccagtcaagcgcacgacgacatgctcgctcaagcgtttcgtaaaaggcttcctgctcgcttttggcgcgcccgatcgcctgatcgaactcctctttgcttgggaggtcgccatcgggggagaggctgcgcagggaatcgaggatcgccgttcggtcgccctcgtcggatgcgatgcggtcgggcttcatcgatgagagcttcggcgaagcgaacgctgcggttccatcgcgcagcggcggcacgctgtcgacgatggcggatgcgtacaggctcgaaacggggcaatgagagcttctttcgtacttgggcatgaaaatcgcgcatgcgcccctctcaagcagcgagaagatgcgctggtgggttgttttcgccggatagcatgcgctttccgacggaatggtgtcgaatcccttcgcgccggcatcgtcgctgcggcctacgaggacggagaatccgagtcgggtgagcaatgtgtgccaaaacggcagcgattcgtaatcgttgagcgtgcagggcagaccgacgacgatgtctgcgcgcgaggacgctttccctttttctcggctttcgtcttgtcgcgaatccccgtagcgggcgaggagcccttgctcgagggccacggtgttgggcgcttttttcgcgccggcggacaggcctcctgtgcggccttgagaattttcgaagaacgagtacgctcgctcgcagcggttgccgtcgatgaagcgacgttctcgagcgggtcgcccgccggttttgcgcccggcgctctggtctttggcggggcgacgcgagaacccttttcccgattcgggctcgctttcgaacgtgacgatcgaaagcgagcattcgttggtgcatccggggcacgcttcggtgcggtagcggggtttgagcgcggcgatgctcgcctgttcgagcagcgagctttcgatgtgcggcgcatgcgagccggcggccctctcgggttgcgacgcctctgcagcacgggcgcgcgagcgggcgacgagggctgcgccgtacgcgcccatgagatgggcgatgtcgggtcggatggcgtgtctgcccgaaacgagctcgaaggcccttaacacggcatcggagaggaaggcgccgccctgtacgacgacggtgttcccgagcgaatcgaggttgtcgaggccgatgactttgaacagggcgttgttcacgaccgaataggagattcccgccgctatgtcgtcgtaggacgcgccgattttctgcgcgtgacgcacgcgcgaagtcatgaatacggtgcacttggttccgaggtcgacgggtgctgccgatttgagggcccgtttagcgaacgcatggggcgtgcagcgaagcgaatgggcgctgccctcgataaacgacccgcatcccgacgagcaggcttcgttgagcaccgcccgacggatcgacccccgctcgatccaaagcgctttcatgtcctgcccgcctatgtcgagaacgaagtccacgtcggggtgcaggctgcgcgcggcgcggagatgagccgtggtttcgacgactcccgaatcgatgccgaacgccgccatgagcaggttttcgccgtagccagtaacagtggcgtgggatatcgtgcacagaggcgtgccgtcgtattcgcgcggaagggcccggtacatatcgagcagcatctccgacgaagcggcgagcacgttgcctgctaccggtcggtaatcggagtgcagaaggcatccgtccccgtcgacgaggacgagcttcacggccgtcgagcccgcatcgatgccgaggtagatcgcgccctgcgcgtctccgaggcgcttgcgggcaatcctttcggatgcgtggcgggcattgaacgcctcgacgtctccctggttggagaagagcgggggcaggcggggaaggtcgccctgcgttccttccgcttcgccgaggcctttctcaagttcggaaagcgacatgtgcacgatggggcttccgagccgtgcgggatcgtctgagagcagcgccgctcctctggcggtgaagaggtgggcgtcgtttggcttgatgccggttttatgatcgaggtcgagtgcgcgtctgaaccgatgcacgaggctcggtatgtgctcgagggggcctccgagaaatatcgtcgtcccttcgatcggccttccgcacgcgagccccccgagcgtctgtttgacgacggcatcgagggcgcttgcggcgatgtcgcttttcttcgcgcccgcgttgagaagcggacgcacgtccgtctgggcgaacacggcgcatcgggaggcgatggggtagcttctggtcgctcccatcgcaaggttgctcatctacttggtcgatacgccgagcatgaatgcgatcgtgtcgatgaatcctcccgtgccccctgcgcaggttgcgttcatgcgctgttcgaggccgccggtgagatagacgatcttggcgtcttcgccgccgagttcgatgatggcatcggcttcggggtaatccgcccgtgcggcgtgcgtcgtggccacgacttcctggacgaagggaacgccgagcgcttcggcgagttctatccctgccgagcccgtcacggcaaccgatcccgaaacgtctccatggcgccatacgagatcgtgggcaacttcggagagcgtggttttgatatcggcccgatgcctgcggtacacggagcgttcgacagcgccgcgttcatcgagaacgacgatcttgatggtcttcgatcctgcgtctatgccgattctgcatgtcatggatactatctataccgcaagttggcgaaaagcgccatgaggcggaaagcatgaatcggcaacgtgcgtgatccgcgaaggtggaatttgtcgggcttctttggggcagacgggcggacgcgtctttataataccagcaaaacacctgatgagaaaacaagattagtctatcggtattatctctaatctgctatttagtgagcatcgcgggatgcaatcgaaggggggcgttgctagagtcttctcagaatcccaaccataaaacgaaaggacagtccatgtgtttcagaccagctgccgtcgagctcgataagaagtgcccgcagtgcggtgcgacatgcaaagccgccgaaaccgtatgccccgaatgcggagccgcgctgccgtcgggtcccgcgatgccgggtgccccgggcgcgccaggcgcaccgagcgcaccaggagccccgggcgcgccgaaagcgccgggagcgccgggtgcccctggtgcgccgaaagcgcctggaagcaactagcgcgaaggcggttgctcggtttcgcgccgaagcgaggtggcgcgaaaccgagcgcatcgattacccgcacgcctatccgcgccgcgttcgctgcgttttccgcgataagcccccgtttgcgagattggacgatatgcatgtgctacccttgcacccattgcaacagatgcggtcgcgaacccaagccggggctctgtccgatgtgcggacacgagaacgcaccgggtgctgccgcgtgcgcgcggtgcaaaatggtatttccccgaccgccggggccttcgaaatcagggagcgcggggggaggaaaagatgcgcgcggaaaaatcgactaggttcttgtcgtcagattccctcgaggaattcggaaagcgacaagtcgaatccgcccgcgatcctttcgagcaggtctatgctggggttgcgctcgccggattcgactttgctgaggtaggcgcgttcgacgttgaccatgttggcgaacgtgacctgcgtcagtccctgctgctgtctcagaaaacgtatccttgcgccgatagcttttctcgtggttttagtcatgggggaatggtatctttagcaatacgggtaactgtgttcgataggacacaactccagttaacattaggaaatgagcatgtttgccgcttaaggggtggtgcgtctgattgcattgcatgagctgacatgtaagtatggtaatcacttatatgtttgaagtccactgcgttgtctcgcagtccagaaaacgagagtgccgactctctccatcactgaatgcaataactgggggtagatgttgcatggaaaacgtatcgattaaccacgtgcacgaaagcgagcaggcgggaaagaaggttcgggaaaagaaaaacgagtggctgttcgtcaatccgtatctcatagtcgggatcgttggcgcttcgttttgcttttcatggttcttctcgatcatcctcacgtcgaatttcctttactcggagattgaagacgtgcgtctctatcaggcgcttcacatcgtattcgccgcagctctcttcgctgcgtattttctggtttggaggctgtcgggcttctttcagaggcatcggggcctgctgttgttcatctctcttgcatgcgggcttgcgagcgcggtgcccgatgcgggtcccgcttccgttcgggatgcggttctgtcgctgaggacggtgtgcgccggggtaggcgtggcgtcgcttgcgaccctttggatcgaatttctatgcgtccacttgaaagaccaggtacgggttgcgatcgcttcgatattcgtcctttcgttcgtgtggtatgcgggagtcattctggtcgatgtgaggttttcgccgttcgttgtgctctcgttcgttttgatttcgtgcacggtctacttcttcctgcgcaagcgcttcgccctcatggatgccatgccgtccatcgatgcgaaagaatcggattctcgcttgctgatcacatggaagccgtctcttctcacggtgatggggtcggtggcgcaggggtttgtgctctattggctgctgcaggcggagtcgtacgtgcccatggcgccgtttttgctcgagggcgtttcccttgtcgtggttcttctccttctcgtcgattcgctcaaatccttcgccatcaaggagtcgttcatcagaaagctgttccttcccgtgctcgcagcctgcattctcacttttctcttcatacccgaggaatggcgctacgttccctgcctactggcgttcgggttctcgctgctgccgtactcgagcgcgatcttcgccacgtgcgagcatatcgtccgatgcgatctctcttcgatacgcgccttttcctgggcgcggctctatgcggccgtcgggctcctcatcggactgggctcgggctggcttgccttcacgagcgaggtgttcggcagcatcaccctccctgttttcgtggtcgtcatcgtgatgttcttcatcctggtttcgacgacgctgagcacgaagagctactatcccggtgaagacgagccgggccaaaggatcgcgcgcatcgggggagacggggaaattctgtacgagcacgtcgtagagcacgcggtcgacggaaagaagtactttcagcagaaatgcgatgccatcgccgaacgttacagcctcacgaacaggcaaaccgaggtgcttcacctgcttgccaaggggcgaaacgccgcctacatacaaaagcaactggtgatttcccagcacactgcgaaagcccacatctattcgatatacaagaagacggaaacccattcgcagcaggatctcatggacctggtggagaactacgaactggacggagaataggaagcgatagcgcatcgcgcgtcttgagagcgggttggtcatatggcagcgatcgaatcaaagggagcggcagggctcggtgccctgaagctcggaatggatgctctggcgggtttcgtcgggttcggatgcgtcatagcatccgttctcgggctctacgttaccgtgcccgggctcgtggcggcagatggcgccgattggctttggatgaggcttgtctacgcggcgtcgatggcggtcgggttcctgatcgtccggttctgcgcttacgccatagccaagcgaaaatgcaccgtgctgctcgcggggtccctcgtcggtttcgccgccatggtcggggtgctgttcgttcccgccgattcccagctcgttcgcctctgctttcattgcgtgatggccttgggcctttcgcttctcgtggtgcagtggttctcctacatatgctcccagccctaccgcatggtgctcatgctcgttgccgccggaatcgcggcgggcattgcggggtgtttgatcgagggctaccttgttgaggttgccgcgcgaacgatgctggtcgtcatgtgggcggtctcgctcggatgcatggccgcccttgtgcgcttccgccccgacgacgcgctgccgcccgtcatcggcaacagagaatccgacaagcgctcgaaaatcctctggacttcgacgatcatgctctctttcagcagcttcgaattcggattggtcgtcagcgtcgcttcggaagcgggggcggcggcgctctgcctcggagctgcattctgcgccgccgttctgcttgcgatcgattgcatgaacaagagggtcgtcaccgagcgcggcatgtcgccgataacgcccccgcttacgatgctgtcttttgtggtcatgttcctgttcgacgatatcgttcagatgatggcgctctgctttcttgcggcgcttttttccatctatacggttttcggctgggcggccatggcggagcatacccgcatttcgcggctttcgcccctgcatacgttttcgaaggcgcgattttacgattacatcgccatggcattgggccttgcgttcggtttcgcggtgttctccatggcgcagcatggcgggcttctggccgtgcaggtgtcggcggtcgttgccatcgcctacagcttccttgcggcgttctgccacaaggcgcggtttcccgaggcgggcgtggaagacgtcgggcatgtttcgcttcccgagacgaaggggctttggaagaagcgctgccgcgcggtctgcgagcagcacgggctttcggagcgacaatacgaggttctcgtgctcgtcgcgcaagggagaaacgcgaagtacatcgagcaggccttgaccatttccctgagcactgcgcagacccatatccgcaacatctaccgcaagacgggcgtccattcccgccaggagctgctcaacctcatcgaagacaccaagctgtacggcgaagactgatccggcttcgtactggactgtcggtattagggattctcgggcttagtcagccgtactcatcgacgggcggcacgaggcttatctttcggcgttttccgaggtcagccatcgtcaaaagttgagtacggaggcgaacaccaagatagctacgatgacagtctctttcgagccgagctattcttcgcgtcaatggcgccgtcatacgccagagacgagaaggaggaatggctcatggctgattatcaagaattcttggacagcgttgaccgcaaagcctaccacgagggcgaggttacgtgggaggaagacggatacaccgttacgcgtacctacaactacagtgctccgggctgtcacgactcttgcggagtcttgctgtacaccaaagacgggaagctcgagaaggtcgaaggcgacccgctcgacccgtatgcgaacggcaagctgtgcatgcgatgccttgatctggaagagatggtcaatcatcccatgcgcctgaagtaccccatgaagcgcgcaggggaacgcggcgagaacaagtgggagcgcatcacgtgggatgcggccctcgatatgatcgagacttacatcaaagaggagatcgacggcaagggcttggggcgcgaagcgatcctcgtcggccacggcacgggccgcaacatcaactggcaggtccccttcatcgccggcgcgtgcttcaggacggcgaacgtgggcggcatctacttctccggatggtggtgctacatgccgcgcgtatgcggtgccgccggtcctttgggagactatccgatcgtcgatgcgtccgaaacgcttcccgaccgctacgccaacgacgaatgggtgcgtcccgacgtgctggtcgtatggggaaacgagccgctcaaatcgaacggggacgggtatctgggccactggttgaacgtctgcgtgcaggcggggaccaaggtcatctcgatcgaccctgtgctcacctggtggggcgcgcgagcggagtactggctgcagccgcatccgggaaccgattgctgcatcgcgctcgcctggctgcacgtcatcatgaacgaagatctgatcgaccacgagttcgttgagaactggtgcgcgtactacgacgagctcaaggagcatgtgcagcagttcacccccgagtgggcagcctcgatcacgggcgtctccgccgaagacatcgtggcaacagcgcgcatgtacgcgaacgcggaccgcggggccatccaatggggccttgtattcgatgccggcacgcgttcttccatgcactggaccgaagcggtttgcgatctcatggctatctgcggcaacatcgagaagcccggaacccacgtgctcgtgcacaactccttcgacatcaacgccggatactcgtcggtcgatctgtacgccgatccgcaggctcttgagcggaagttccgcaagtggatggtgggcgacgagggtctcgatttcgtgggcatgtcgaactgcgacgccatggcatcggtgctcgaggccgagaagatccccgcaacgggcgaagagtatcccatcaagatgctctgggcgcaaagctgcaatgcgttcgccggacacgaggggcaggcgccgcgcgcatacaagtacatgtctcggataccgttcatcgtgtacgccgatcccttcatcacgccgaccatggtcgccatcgccgatctgatcctgcccgtatccatgtcggtggagcgcgattcggcccgtacgtggtggactccgctgcgagccatgaagaaggtcacgagctactacgaggcgaaatccgacgaggagatcgcgctgtggctcggcaagcgtctcaaccctgagctgttcgtgcgttgggacaccgccgaagatttcatcaacgattacctgctgacggacttggccgttgtgggtccggacggcaaggtgaagaaagcgaacttctcggctgcaaccgatgacgattggggccatacctccgtcaccgatgacagcggtccctccatcacgacgaaatgcccctatactttcgaccagctggtggcggcgggcggacacgcttacgatgaatggaacgccacgtacaacaagcatgaaaagggcatgctgcgtcccgacgggcaggttggcttcaacacgccgtccggccgcatcgagcttgttccgacgatcttccaggcatggggaatccccccgtacccggtatacacccccgcgcccgaaacgtgggaaaccacgccggaggttatggaggacctgccgttctacatgatcaacggcgcccgttcctacgaattcttccataccgagcatcgtcaggcgccgaccatgcgcgagttccatccggagccgctggtcaaggtgtctccgaagacggctgcggaatacgatctgcatgacggcgactggatctggatggagaacaacgaaggccgctgcaagcagatggtcgaggtgttcgagggcattcccgacgactgcatttccgccgagcacggatggtggaagcccgaagaggagggggcggccccgcatctgcacggttgcttcgactacaacgtgaacaatctgacacgcaacttccaatcgggccctggcggcatcggctctccgatcaagtgcacgcgttgccgcatctacaaggtgcaggaaggcgatgtcatgccgggagtccagatcacgcagctgggcggatggcgcgatgactaccagcccatgcaagcgtaaggaggaacagacaatgaccaaggcgattctcatcaactacgagtactgcacgggctgccattcctgcgaggtggcctgcaagaaggagctcgggcttcccgccggggagttcggcataaagctcaccgagacgggcccctacgcctacgggggcaaggccggcccggaccgctgggagtggacgtggctgcccgtgatcaccaaggcctgcgacatgtgcgagtcgcgcacggagaagggcaagatgcccatgtgcgtgcagcactgccaggcgtggtgcatgtactacggggaggccgacgagctcgtcaagaagatggacggccagacccgctgggcgctctacaccaggtagcgccctctcgggtgcccggcttcgggtcgggcacccagatgcggtgcagtcgtttcgatcgtcgtttctgcgagtcgatttctcgcagaaacgacgagagtcatctcttcgaaagattcttcatggggggaggaggcgaggatcgcttgccatgaaggtcaagcccattgggggaattcaaaaacaataaggaggaaaacatgactaccgatatagatgctcgtagcaagaagagggcgcttgcggtattcgttggctgttgcgtcatgcaggcgtttggtttgggcactatactgaattcgtcttcagcgtatttcgctgttgtgccaggagccgttggcctcggcatgggcgagttcgcgatgtggcttacgtgttacggcatcgctgccctgttcggcacattcttcgcgggaatacttattccaaagtttggcgcgaagactgtcatatcagtcgatgtcgtaatatcggctattgccgttgcatgcttcgcatttgcgactgaagcatggcaatttgccgcccttggtgtggtaatcggcttgtctggcggtatgtatttcctgtatgccacgccgctgctcatgaacgcttggttcggcaagaaataccttggccgttatttgggcattgctcagctgttctctggaattggcggagccattttcccgctcgtgttcacgtctctgttcggtgtgatcgggtatcagggagtgtacttcctcaatgctgtgctgatcgcatgcatcttgatcttctcattaacggtgttctgcgaaaacccggcgaagatcgggcttcatgcatatggtgccgaagaggatgtcacaaaaggttcggacgaagccaagatttcgttccctggcgttcctttgaagtatgctttgcctacgctcgcttttgttttatgctttatcggatgtgccctttccgcttttccgggcagctacaattcttacattcaggcgaacgccgtttcggttttgggcgatggttaccttgctttctccgcaacgcttatgactgctttgcagatcggttatatcatttcgacgttcgttgctggtttccttgctgacaagatcggcatcaagaaggttacgataatcctgtatgcgattctgatcatctgctatattctgttctcgttcctgaattctccgttcgcccttctcgcatgcgccttcttcttcggaatgaacaattctcttgtaacgatctcgattcccatgctcgtcaaagagtatttcggcgacaaagcgtatgacaagattctttcgtactgcatgatgggagtcggcctcatggggtctatgggagctcccgttatcggattcattttcgacagcacgggttcctatagcggcacgttcatcgtcggtgctgtcgtcggagccgtggctatcgtcgcgattcttgccgccttcccgtttgccaaaaaggtccgcgaagagcattgggcgaacagctgatgcccggacgacttaatgctcgataacgacttagggaaagggttgcgtgtatgaacacgaacaaaccgcttgttctcggtgggtttccgtgggatacgggacttcatctaccgagccgcatgtggttcatgcccaactgatcctttgtttgagaggcgccccctgcgcgaaaacgcggggggcctaaggaggtgttttccgtgtctgaaaaaaagaagggcatccattatgcatggctggtgatgatcgggtgctgttttctccaggcgggcgctttgggcgcgattatgaactccggtggtattttctttgttcccatctgcgatgaccttgggtttgatcgcggggcgatcgctctgtacttgacgttctacttcattgcgacgacgtttacgtatccgcttgtcgcaaagtttctgccgaaatggaactttcgcgtattcctcaccgtgtgctttttgatcatcgctgctacagaggcatgcatggggctgttcaccgaattatggcagtggtacgtagcgggagttgttcttggggttgctggagcattggtgtttgtcgtggcgtcgacagtgcttatcgaaaactggttcgtcgaaaagcgcggcacggcacttggcatcgcaatgtgcggatcggggatcggcggggtcatcttccctatgctcggcacctggttgatcgaggttgtcggctggaggatggcgtacccgactatagccgtcattatctgcatcatagtgctgccatggaccatgttcgtattcaggctaaacccttctgaactcggattgaagccttatggagccgaaagggccgccgaactcgaggccgaggcgagccatgcgaagggcatgccggcgaaaaaggcgatcgttacgttggctttcgtatgcatctttgcctatgccgggatagaagccctgttcagcggttacaacaatcatctacctggatttgccgagtcactcggctacacagctgctttcggggctggcattctctccttggcacagcttggctatacggttgcgactcttgttatggggtgggttaccgacaagattggcgttgctgcttctacgtacataactcttggcgttacagctgcatcgttgcttggtttctctttccttcaagacgaggttcccctgatggtggctgcattcgtatttgggatgaactccgtcatcatcacgatttcggttccaacgcttatttcggatattttcggcaagaaatacttcgcgcagattctttcgtattcgcgcatgtcggggatcataggctgcttcggtgctgctgcggtcggagcatgctatgacattacgggaagctacgtggggtcgttcgtagccggcatcgtcatactcgtcatctgcgccattcttgtgggggttgcgcttacgcaaaagaaaaagatcaggatgcagtgggagtaacggctgtcgcggcgattcgtcgatatttgaatgattctggaaaaccgcagttcagtagctaagtcacatcggctgatatgcggttttcccgcttcataccgtgggtctatgaccgtggtgggaacaatcagtctcgtatttcgtagatgtagcaagatcgggcaatggaagtatcgccgcatgcctgtaccatgtgcgccgtcgaataaaagacaagcaagatagggaggaatcatggctgattaccaagagtttcttgacggagtggatcgcgaggcgtaccacgaaggagaatggcggtgggaagaagacgggtacaccgtcacccgcacctaccattattcgcctccgggttgccatacgtcgtgcggtattctcctttatacgaaagacggaaaggtcgagcgcgtcgagggagatcctctcgatccctgcacgaacggcaagctgtgcataaagtgcctgacgctcgacgagtcggtgaaccatcccgatcgcctgaaataccccatgcggcgcgcgggcgagcgcggcgagaacaagtgggagcgcatttcgtgggatgaggcgtacgacgagatcgaggcgaaggtcaagcagatttgggaaaccgacggcggcaacgccatcatctgcgtgcacggcacgggccgcaacatcaactggcaggttccgtttttcgggcaggcggcgctgaagacgccgaacatctcgacgttcggattcaccggattctcctgctacatgccgcgcatctgcggctccatcgcgccgttcggtgattttccgatcgtcgacgcttccgagacccatgaggaccgctacaacaatcccgagtgggttccgcccgaggtgctcgtcgtttggggcaacgagcctttggcttcgaacgccgacggctacatcggccactggctcgtgcagtgcgtgcagatgggaaccaaaatcatatccatcgatccgcgtctgacctggtggggcgctcgggccgaatactggctgcagattcggcccggcaccgatgcggcgctcggctgcgcgtggttgaacgtcatcatcgaagagggcctctacgatgccgattacgtggcttcgtggtgcgccggcttcgaagagctggcggaatcggtgaaggacacgactcccgagtgggccgctcccatctgcgatctcgatgccgatgacatccgcgcttcggcccgattgtacgcaagcgccaagcctggtgccatccagtggggcctggcattcgatcagcagctttcggccatggctctctgccttgccggatgcgacctcatggcgctgtgcggaaacgtcgatgtgcccggcggcaacattctcgtgcacaacgcgttcgagatcaatgcgggatacgcttcgggcgagcatctgactcccgccgaatggcgcgctaagaagctcaacaacaacttcgcgctttcggtcgagggcggcgatttcgttgcccatgcgagctcggatggcttgctgcaggcaatcgaggacggcttcccgtatccgatcaagatgatgtggatacaatcgtccaatacgctgtcctgcccgagccaggacgcaccccgcgtgatgaaggccatgcagaacataccgttcatcgtgaacgccgatccgtacgtgacgccgacgtcggtggcgcttgccgacatcatccttcccgtggcgatgagcgccgagcgcaattcggctcgcacgtggtggtcgccgtgccgcgccatggtgaaggtatcggatttctacgaagccaaatccgacgagcagatcatcctggagctcggcaagcgtttgaaccccgaggtgttcgatcagtgggagactgatatcgattggttgaactggtatctccatgacggaaccggatcgttttccgcgaccaccgaggcaaccgaccagggtggcgccaagaactcgggcaagacgctcttcacggcatcgtgggacgagctcgtgcgcgatccgagcatgctgggccacagctacgacgaattcaacgccacctacaacaaggccgagaaggggatgttccgccccgacggctcgatcggctacggaacgccttcgggccggctggagcttgcgcccatgctctaccaatactggggcttgagcacgacgccgttccacaccgaaccgcccgagagcccgatctcgacgccggagctcatggcggattacccgctgatactcacctgcggcggccgctcgttcgagttcttccattccgagcatcgccagctgccgacgatgcgcgaactgcacccgcagccgcgcgtgctcgtcaacccggcgacggccgagaagtacggcatccaggatgggcagtgggtctggatagaaaacgaccatggcaggttcaaacagatagccaaggtgtcgccggtggtcaacgagaagacggttcacgccgaacacggttggtggttccccgaaaccgaaccgtcggctccccatctgttcggcacgttcgaatcgaatccgaacaactgcaccaaggcgttcgtgacggggcagggcggcgtcgggtcgccgatcaagggaatgatctgcaagatctatcccgtgcgtgcaggggatacgatgccgtatcagcagatcgctgaaacgggcaacttcccctggtatgaaaaagtggaatcgcctcgccaggatgaaatcgaccgcttccatgcggcgcttgggcagggcatggaatacgacgttatgtccaaccagctcatcgatccgtcgacgggcgagcgcaccgatctgaaaaccggcgccaaggttgaggcgtagcggggacaaggcgaggaggaacagacaatgaccaaggcgattctcatcaactacgagtactgcacgggctgccattcctgcgaggtggcctgcaagaaggagctcgggcttcccgccggggagttcggcataaagctcaccgagacgggcccctacgcctacgggggcaaggccggcccggaccgctgggagtggacgtggctgcccgtgatcaccaaggcctgcgacatgtgcgagtcgcgcacggagaagggcaagatgcccatgtgcgtgcagcactgccaggcgtggtgcatgtactacggggaggccgacgagctcgtcaagaagatggacggccagacccgctgggcgctctacaccaggtagaaaacgttatttgacgaaacgaacggcagccttcgggccgccgttcggggtcgttttcgggttttgccgccggcgtgcggcgttgggcggtgcggaaacgacgaagcgacgagaacggagatgggtatgaaaaaataaccgagcgcgagaatttctaccgtatgatcgatcgcgagaaaccggatttcattccgcaccaaccgagtctgttgcagatgatcatacccagtgcgctcggagaccgcgccgagaattgcgcgacgggttacgactggttcggcgtgcactggacggaagatcccgatatgcccatgatgcccatggtgacgccggggatcgatccgattctcgaagacatcgaggactgggaagacgtcattgaatggcctgacctcgatgcgatcgactgggaggcgtgcgcgaagaaggacgttccccgaaaagacccgtccaaggtcctgtgtgccatgatgctttccggaccgttcgagaggctccacgacttgatgggattcgaggaggcgctctgcgccctggtgaccaatcccgaggagtgcgaagccttcttcagccgtctctgcgatttcaaaatcgagcagatcaggcgtttgaagaaatactacgacatcgacatggtccacttccaggacgactgggggacgcaaaacgacctcatgttccaacccgacatatggcgagagctcatccgtccgcatgtgcaacgggtcgtcgatgccgcccatgaggtcggtgtcctgttcgatcagcatagctgcgggaagatcgatcgcatcatcggggaagtcatcgatatggggatcgacgtgatcgaccccgtgcaaccggttaacgatatcgatcgatggattgccgattacaaggacagggtcgttttcatgggcgccctcgatgcgcaaaacgtcatcgacaaccccgatgccaccgatgaggagatcatgggcgaggtgaagcagaagatcgatctgttcggaaacgcaggagccttcttcatcccctttgccgtttcactgaccccgaacgtcatgaaggcgcttgacgattgcttcgtctacggcagggcgttttacgacgatgcgtatctcgacgatatagagcgattcgagcaagaggctgctcggagggcgggaaagcctctgaagatgggtacggttcccggaaccgagatgaatcagtagaaaggggcggccgcgggcagcctcccggcgcccgcgatgctgccggggattgcggcgacaggaaaggagcacggcatgtcgattctcgatgacatttcaagtgcggttcaacgagggaagaagaaagaagtcaaaccgcttgtccagcaggcgatcgccgagggggtcgatccctcggcgatcctgaacgaggggcttatcgccgccatgtcggtggttggcgagaaattctctgccggggaggtgttcgttcccgagatgctcgtggcggctcgggcgatgagcgcgggcaccgagattctcaagccccatcttgcgggggagagcgccgagcctttgggaaaggcggttatcggcaccgtcaaaggagatatgcatgacatcggcaagaatctggtgcgcatgatgatcgagagcaaaggattcgaggtcaccgatctcggcgtcgatgttgctcccgaaacgttcgtcacatttctgcaggagcacgatgacatcgacatcgtgtgctgctcggcccttctgacgacgaccatgccggcgatcgctgcgaccatacgggcgatcgaggacgccggattgcgcgacaacgtgaaaatcatgatcggcggcgcacccgttacccagtcgtttgcagacgaggtgggcgccgatgcgtatacggcggatgccggtgcggcggcggtgaaggccgccgaactggtgaggtgatcgccggtaacggcctcggattaaaaggagatcattctgtggatatgagaacatggatggcaaacaccatcgcggcggataggaagaaagcgcttcccgtcctttcctttccagccgtgcagatgatgggcatttcggttaaggatctgatcgattcatccgaataccaggccgaagccatgcggttggttgccgagcgggttgacagcgctgcagcggtttcgttcatggacctttcggtggaggcggaagccttcgggagccgcgtcgtcgtttcggacgaagaggttccaaccgttgtcggatcgatcatcgacgaagatgcgacgatcgacgatctcgtcgttcccgaagtcggcgcgggaagaacggggctgtatttggaggcgatcgagaacgtcgtgccgcgcataacggatcggccggtacttgctggcatgatcgggccgttttcccttgcggggcgccttatggacgtgaccgagataatgatgctgtgctacgacgagcccgaactggtgagcgatgtgctcgatgcatgcaccgattttctcgttcgctacgcgctcgagtacaagcgggttcgagcgaacgggatcgtgatggcggaaccgcttgcggggcttctttcgccggccttggcggaagaattctcgtcgccgtacgttcgccacatcgtggacgccgtccaagacgatgagtttgccgtgatctaccacaattgcggcgaaggcgtcgtcaagtcgatcgattcgatcgtcgcaacgggcgcaatgggctttcattttggaaacgccatcgagatggcggacgtccttcctctcgttccctcggatcgcctcgtcatgggcaatatcgatcctgcgggcgagatccgcaacgggacgcctgacggcatccgagccaaaacgcttgcccttttggaacagtgcgcgtcgtatccgaacttcatcgtttcgacggggtgcgacatacctcctatgtcgccctgggaaaacatcgaggcgttcttcgccgccgtcgacgagttctacgatcggtgatctctttagcgggcgggcggaatagcgcggacaagcttcatgcatggatggcggggcgttgccgagggttggcgacgccctgtttttcgccgccgccgtcgatggaaacccgtgtccggcgaatcttgcggcacgcctcgcccgcttcgccgattcggccgaggcgacggtgcgcactgcccggttagcctgggagcattacgggttttcgcactaaagcaaacgtacctagcggcgttgcgccaaaggctagtcttttgctgttttcccagatcaaccatcatcaattatacggtatgggcaagaataccccgttgggtacggcgacagtgcgcaacggtgcgcgctatcctttgcccgcaacggcgcttttacgcgtttcaggacgagaacgaggaaggatgtgaccatgagcgaagacgagttctataaaaaagccgaagttgtcaagctcgacacgctttcggatgtcaacgacatcggcaagccgtggcgctacgaggaggatgggctgactgtcacgcgcacgagtccctggtcgcctccgggatgccacccggtgggctgcggactcaaactttacgtcaacgacgagggccggctggtcagggtcgagggcgatgagaacaatccggtcacgcagggccgtctgtgcccgcggtgcattgcgctgaaggactacatctacaatccggcgcgcctgctgtacccgatgaagcgcgacccgaaggatcgcggcaatgcggatgcgtgggagcagatcacctgggacgaggctttcgatatcattaaaaaggagtacgatcgcatcacggccgcatacggccgcgagagcatcgtggtcttcgcgggcaccggccgcgagggcggcaccttcgcgccctacggcaccatgtgcttcggaaccccgaacttctgctatacgcaatcgggctacgcatgctatacgccgcgtctggcggcgatcgcctacattgcgggcacgacgtatcccgagtgggattacgccggagcccttcccggacgctgggacgacgagcgctacgagctcaccgagtgtcttgtcgtctggggcaaggcgccgctcgagtcgaaccccgacggctttttcgggcatgccgtgatcgatgcgatgcgtcgcggcacgcgcctgatcgtcatcgatccccgcgtcaactggctggcgacccgcgccgacatccatttgcagctgcgtgcgggcaccgacaccgccatgggcatggcgtggctcaacatcatcatcaacgaagatctgtacgaccatgatttcgtggagtactggtgctacggtttcgagcagctggccgagcgcgtgcaggaaatgccgcccgagaaggcagccgagatatgcgacgtgccggttgagaagatatacgccgccgcccgcatgtacgcccaggcgaagccggcggcgatccaatggggcctcgcggccgaccagaagaccgacggcatgcaaaacggtcaggtgaccgtcgatctgatggcgatcacgggcaacctcgacgttcccggcggacagatccttcccggtaccggagccggtcacaacgagtcgggcttcgggttcgagaagggcgtcggcgaagagctccagaagaagatgatcggcctcgatcagtatcccgcatactgcatgatcatcctgaacgcccatgcagatctcatgctccatgcgctcgaaaccggcgatccctatcccatcaagatgggcttctacgcgggcaacaacctcatgagctgcacctcgatggagccgaagcgctggcacgacgccatcgtcaaatccctcgaattctgcatcggcttcgacaccttcatgaacccgtcgatcgaagcgtcctgcgatatattcctgccgctttcgacggtggccgagcgcgagggaaccgtgttcacccactatgctccctgcaccgtaaccgccggcttcatgcacaaggcgatcgaggtgggcgagaccatgaccgacttcgagctgtgctacgaactcggccgccgtttgcgccccgaagtctgggaggaattcgatacggccaaggagttcatggaggcgctgcgcctgggccgtcgcgagcagggacggtatttcgatgaggtgtccaagaacgtcgtatgccagattcccgtcgattactacaagtacgagcggggcgagatgcgccaggacgggcagcccggcttcgcaacaccgacggggcgcgtcgagctgtggtcgaccgcgttcaaccagttcggtgacgacccgctgccgtacttcctcgaacccgagttcggtcctgcgaatcccgagcttatgaaggaatacccctacatcctcaccacgggcgcgcgcacgacggcgttcttccactccgagcatcgccagattgcctacctgcgcgaactcaaccccgatcctatcgtcgagatcaacccgaaggttgccaaggacctgggcattaccgacggccagtgggttcgcatgtggagcccgttcggcgaatgcgttgagaaggcgcgcatcaccgaaaccgtcgatgagaagaccatccatgcgcagcatgcatggtggttccccgaggaggacggaagcgagcccaatctctacggaaacttccgctcgaatatcaacaacctgcttcccaacgaccactacggtaagcttggcttcggcgctccgaacaagtgcctcgtatgcaacatcgagcccgtttccgaaagctacgacaccgacatggatctgatctgggaaaaattcggaaagctggtgtagctatggcaacctatggactattgatcgattacgaatactgcacgaactgcggttcgtgccaggtcacctgcaaggaagaacatgcctatccggtggggaagacgggtatcaaggtgctctccgacgggccgtggaaaatcgatgacgagcactggaactggaattactttcctgttctgaccgacctgtgcgacctgtgcgccgagcgcacggcgggcggccgcgaaccgatgtgcgtgcatcactgcctgtcgaacatcatcacctacgggccggtcgaagagcttgcgaagaagctcgatgaaaagccgaagcagttcctgatggtgccccagtacaatcccatcgctgccaggggagagttcgtgccgagcggaaagcagaagcaccaagccgcccatatcgaagtgcagggcacgggcaaggcgtcgtatgccgtccatcgacacgataccaaggtgggcgaaatcgacgaaaccgaggaactcggctagcaagcatgcggataggaagcgataggcggtagacatggacgacaacagcaggatcggcaaacttgcttctattcgatacaggggcggcgtcaaaggcgaggagcccgctgacgatcgttcgagcggagagcccctgaccgtcatgctcggcgatatgagcctgccgcgaggcatcgaggaggcggtgctcgatatgcaggttggcgagcagcgcacgatcgacataccgtgcgagaagggctacggggagcatcaggacaagcttgcgaactggtatccgaagacgatggtcgatggtggctacgacctcgctgtgggcgacgtgatgttctggacgaaccaggaagacggaaggcgaatgcccgtctgggtgaccgaaatgacccaggatgcggttaagctggacttcaaccacccgttcgccgggaaaacgcttacctactggatcgaactcgtcgatttgaagtaggcgatcgacgtgtgctacccctgtacccagtgcggtcgctgcggcaagtacgacgaagcgagtccgtattacacgcctcttgcaaagataccgtgcttcggatgtggcggcgaggtcgacccttcgacggggaggtgtccgacgtgcgggaaagccgctttcgaacccgcaggggcccgtcggggcgaggatggcgaaccatcgccgtcgcgcggtgatcgctgacgcggagaaaaggaagccggagccccaaggctccggcttcctttatgggagcggagattgggtgcggcttggccggaagtagcctatttatcgaaatgaactcgccgcggctcccgttctgcgatacaatccacaaggagcaacaggggattgcgatggaaagcggtgtggctttcgcgcaagccatgcgagatacgtaaagacgaggagctatcgatgaaggtaaccgaaaagaaactggacgacggcaggattcagcttgaagccgttgcgacgccggaagaggtcgatcaggcgctgaatgccgcagcatacggcttcgctcagcagatgaacctgcatcccgtgcagggaaagaccatcgagcagattgtggaagaccagctcggcatcaaggatctcgcatcgatcgtggagcctcagacgaccgagatgctcgtgccgttcgccatcgacaagaagaacatcatcccctcgtatcctccgaaggccacggcgaaaagccccctcaagcgcggacagagcttcacgttcagcctgacggtttctccccgtcccgactacgagctcagctcgtacgaccccgtttcgatcacggttgcgccgttcgagatcgatcctgccgaagtggaaaacgagatcgcgcgcatggccgatcagttcgcagaattcgtgaccgatgatccccatcccgttcagtcgggcgatcactgcatgctcgccatcgaggccaccaaggacggcgaacccatgcagggcctgacgaccgacggccgcacctacaccgcaggagcgggactcatgcccgacgggttcgacgagaacgtcatcggcatggacgtaggggagaccaaatcgtttacgttcacgggccccggtctcgacgacaagggcaaccagatcgatgaaaccatcgaatgcaccgtgacggtgaaggagatacagaagcgcgtgatccccgccatcaccgacgaatgggtcaagaagaacatgccgctgtaccgcgatgccgacgcgcttcgggggagcatcaaggaccgcatcgaaaaaggccgcatgaacgaatacgagaactacaagcgccaggttgcggcatccgagctcgcaaagcgtttctcgggccgcatcgccgacgaggtgtacgaggccatgcagcagacgatgctcatgaacatgcgctccgaactccagcagcagggcatgaccttcgagcagttcgtcgagcagaacggcggcgaacagcagttcaacatgatgctgatgatgcagatccgcgaaacgctcgttcagggctacgcgcttgacgcgctgttccgccacgaaggcctcgttgtgaccgacgaggatctcgaagacgcctgcaggctcatgaacccgcagaatccccagatggcccgtcagcagatggagtcgtcgggccgcggattcgcgctgcgcgagatcgccgagcgcatgaaggccaataagtggctgctcgatcacgccgaggtgacgatcgccgagccgcagaagtagattctcgggaccagaggacggccgtctgtgcggcgagccgtgtcgcagcgcttttcaaggccgacgggagaaaaacccgtcggcctttgcttttgcgcgcccagcccgtgtttgcggttgctaccgaagcacgcagctcgtgtaagcgatggttcctttgccgtgatagtaggggatattggcggactcgcatacttcggaaacgacgagccccgccgcttcgacggaaacgaaggctttgtcggggaacctgcaggcggcatcggggtaggtgcatgacgggcacaccgtgcagccgcctgccgcgaggaagagaagcgcgccttcttcccgttttcgaccgtctgtcgatccgaaagcagcgcctttctccaagggggcgcccaggatgtcgcaggcgtttcgggcgaactgcgcaaaccttcttttgtggagcgcctccgcctcctgcatgccttcgatgtcgaattcgtcttcaagcgttgcgaccgtttggacgacgagagcggtttccttcgaggcgattgcttcagcgaacgcatcgagacttccgcatgcgggcgggcacacccagcttctgtcgtaggcgcggcagcgatcggcggcgcacatgtcgcggacttcgggtttgacagacaggcgcgaggcggctgtcgctcccaccgcttcgaaccccgcttcgcgtgccagttccatgagcgcatccgaggattcggtttcgctgttttcgagaaaaggttctctgttttcgatgccgtccatgcattctcctgccgctgtttttttcgggttgcgagcatattagcatcgaagtcttaggagcgcattcggcgtcggattcgattctccaagatcagccttcacgcctcatgtttcctacggctccgcttcctaaactgctcgtagtgtttgaacggtgcgcggcgtgcagatcgcgtatacccgcttgcgtgggagtgcttctgcgtgccgtgcgaaagcgcaattcgagttgtaaggagaatcgatgtctatctacgacgatatttcaagcgcggtgcagcgcggcaagaaaaaagaggtcaagcccctcgtgcagcaggcgcttgacgaaggttgcgatccgatcaggattctgaacgagggcatggttcccgctatgaccatcatcggcgacaagttctccgccggcgaggtgttcgtgccggaaatgctcgtggctgcacgtgccatggctgcgggcaccgagatcctgaagccgtttctggctgctgaaggcgcggagcccgtgggcaaggccgtcatcggcaccgtcaaaggggatatgcacgatatcggcaagaaccttgtgcgcatgatgattgaatccaaaggcttcgagatcaccgatctgggtgtggatgtggctcccgagcagttcgtgagcttcttgcaggaacacgacgatatcgacatcgtgtgctgctcggcgctgttgacgaccaccatgcccgaaatcgccaccaccatcaaggcgatcgaggaggcgggcctgcgcgattcggtgaagatcatggttggcggcgcaccggttactcaggcattcgccgacgaagtgggggccgatgcctacaccgccgatgccggcgccgccgctgcgaaggccgtcgagctcgtacagaaataaagtcagccccggcaccggttttcagccggtgccgtttgcatgcgcatcgctttgaaatcaaaacaagaaaggcacttgactatggatatgcagaaatgggtcgctgacctcattgccgcagagaagaagaagcccctgccggttgtgtcgtttccggccattcaggtgatggggatttcggttaaagatcttatcgaggatgcgggattgcaggccgaggccatgaagatcgtggccgaccgcctcgatacctcggcgagcgtgtcgtttatggacctgtcggttgaggccgaggcgttcggctccgagatacgcgtttcggacgaagaggtgcccacggtggtcggctccatcgtggacgaggattccgatcccgacgacctcgtggtgcctgaggtgggcgcgggccgcacgggcctctacgtcgaggccatccgccgcgtcgtgccgctcatcgatgaccgcccggtgctcgctggcgttatcggccccttctctttggccggtcgcctcatggacgtgaacgagatcatgcccctgtgctacgaggagcccgaacttgtgtccgctgtgctcgataagaccactgatttcattatcgcctacaccaaagcgttcaaagaggcgggcgctgacggcgttgtcgtggcagagcccatggcggggcttctttccccggatcttatgggcgaattctccaccccttacgtgcgccgcatcgttgacgaagtgcaagatgaggcgttcgctgtggtctaccacaactgcggagcatccgtcgtgaaggcccatgaacaggtttttgcaaccggagcggccgcgtatcatttcggcaacgccatcgacatggcggatatcatgccgctcgttccggccgactgcgtggccatgggcaacatcgatccggccggggagatcaagaacggtacccccgaaagcgtgcgggcggcgacgacggcccttatggagtcgtgcgcatcgtatcccaacttcgtgccttcgactggctgcgacgttccgccgatggccccctgggagaacatcgaagctttctttgacgcggtcgactcgttttacaaataattatcggagcagggtggaaaggaacgatatcgatggagatgactccgagagagaacatgatggccattttcgcaggggagcagccggcgtattacaacgacttccaaagcgccgtcaagatcatactcgatccggtttggatgagcgattcggtgcccgaggacggcctcgagcacaaggattcgtggggtacggtatgcattcgggcgatcggctcgccgggcaagcatccccacgtgacgcccgagaacgcggtagtcaaagacatcgaggaatggaaaagccagcttgtcattccgtcgtacaaggaccttgactggagcaaggccgaagagcaggctgcagcggtcgatcgcagccagtacttcgtcgagtacttctgcgcacagggtctgttcgagcgatcccatttcctcatgggaatggaggatgcgttttgcgcgtatctcgaagagcccgaggcgatgatggagatgctcgaggcgatcgccgagtacaagaaggccgtgatcaaggaagcggccttccacctgcatcccgatgtcattttctttcaggatgactggggcagcaagcagaatctgttcttgccgcctgacacctggcgcgagatgatcaagccgcttcaggccgacatcgccaaaacgattcacgagtgcggcatgttgtacgtgcatcatgccgactgcatttgcgaacccatcgtcgaggatatggtggaaataggaatcgatatctggcagggcgtcattccccaaaacgacatcgtgtccattcaggagcgcacgggcggcaaactggcgatgatagggggcatcgacggtcctgccatcgatgatgaaagcacccctgacgaggcgatagtcaatgaggtgcgccgttgcgtggatacgtactgtcctgccggcaggttcttccccggcgcgcccgcaccgcttttgcgcaagcgaaacagcgatgttctgaacgccgagcttgattcgtacggtcgcgagtgggccgaaaaacatccaatcgcataagcagaaggcccgcttcggcgggccttcgtctaggaggaggtcgccatgcagtatcgtagcctgttcgagccggttcgcattgcgggaatcgagttgccgaatcgtttcgccatgtgcgccatgggccctatgggcttgggcgatgcggagggcggtttcacgcagcggggaatcgattattacgtagagcgagcgaagggcggtacgggccttatcatcacgggcgtaacgcatgccgccaacaacatcgaggtgcacgagtacccctcaacgccctcggcaaccatcaatccgcctcacttcatcaggacggcgcgcgagatgaccgaacgcattcacgcgtacggttcgagtatctttctgcagctttcagcaggtttcggacgggttttcgccgaaatggcgccaggggaactgcccgtatcggcttcccccatccaaaatcgctggatcgacgttgattgccgcccccttacggtggatgagatacgcgatatcgtgcggcagtgcggtcaggcggcgggcattgccaaagacgccggtttcgacggcgtgcagatacacgcggtgcatgaagggtatctgctcgatcagttcgccatatcgtttttcaaccagcgcaccgacgagtacggcggatcgcttgcgaaccgcttgcgcttcgcggccgaggtgtgcgcggagatcaagcgcgtatgcggggatgattttcccgttacgctgcggttttcgccgaaaagcttcatcaaggattggcgcgagggcgctctgccgggcgaagaattcgaagagaaggggcgcgacgttgccgagggcgtggaagcggcgcggcttttggagcgctacggctacgatgcgctcgatgtcgatgtgggttgctatgatgcctggtggtggaaccatccgccgatgtatcaggagaaggggctctaccgcgcatacgcgaaaatggtgaaggaggcggtgggcattccggtcatatgcgcgggccgcatggatgatccggatatggcgcaggcggcggtagccgatggcacgtgcgacatcatcggtctggcgcgccctcttttggccgacccccattacgtgaacaagctgcgcgccgatgacgtggcgggcattcgcccctgtctttcgtgtcacgagggctgcctggggcgcatgattcgttacaagaacatctcgtgcgcggtcaatcccgcttgcgcccgcgagcgctacgcgcagcttgcgccggcgctcgagaagaagcggatcgtggttgtgggaggcggtcctgcgggcatggaggtcgcgcgggtgtgcaaaacgcgcggccacgaaacggtgctcttcgaagcccgtgattgcttgggcggcaatctcgtatgcggcggcgctcccgatttcaaggaggacgaccgcgcccttgttgcctggtacgtcgaacaattggagcgtctgggcgttgacgtgcggctcaatgctccgatgacggccgaggcgctcgaacgcgaagcatgcgaccatatcgtcatcgctacgggcgccctgccgaagatgttccctctcggcgattccgaattcgtgttcggggccgaggaggtgctgatgggaagagcggatcctggcgaggccgtggcggtgatcggcggcggtttggttggctgcgagcttgcgctgtggctcgctcggcaaggtcggcgcgtgtcgatcgtggaggtgctcgacgacatcctcaagctcaacggcccgctgtgcccgagcaacttcgagatgctgcgcctgctgcttgttcagcagggggtggatatcgttaccggcgcatcggcgacttcgtttgcggcgggcgagcttgtggtggagacctccgagggcagcgtggcgattcccgcaacgggcgttgtcgaatgcgtcggctatgctgaaaacgatgcgctgtacgaagcgtgccgatacggaaagcatcccgtacacaaaataggcgatgcccgcacggtggccaacatcatgaacgccatttgggacgcctacgaattgggaagctccctgtagcatccccttgcgcccaggcgcctcgcgggcgggcgtctgggcgtgatggccggttcagtcgtcgaatcccatggcctcgatgtagcgttcgttgaacagggggctggtggacagctcaaggtactcgcagtgcgcggcgacgcgttcgatggctgatcttccctcgtcgaacaaggcctcgacggcccctttgcctgcggcgtttcccaaaggcacgattcgggcgcctaaaacggggggaataaggccgatttttgcggcgctcgccggccgaaagtgcatgccgaagccccctgccaaaaagacgttctcgatatcgtcgtcggatgcgccgagcgtttccatcatggtttcgatgccggctcgaagggccgccttcgcaagctgcacgcatcggatgtctttctgggttagatagacgcggtgtgcagcatcgagatagcagacggcttgcccttgctctctcccaacgagaagcgcgaatcgggagggggcttcgtccttgtcggcaaggtatccggtctcgtcgacaaggccggcctctatcagacatgccacggcgtcgagcagccccgatccgcacagcccgaggggttctttcccgtcgatcgtctcgatgacaagaccctcttccgacagagccacgcacgagattgccccgggcatagcgggcatgccgaaggtgatgttcgctccttcgaatgccggtcctgcggcggtggcgcagcacagcaggcgatcacggttgcccaaggccatctccccgtttgttccgaggtcgatgaagagctggatcttctctctctctcggcaacctgcgcaacgcaaagccctgcggttacatcgccgcccacgtacccggcaaccgctggggcgaagtaggcggattctcgcgcgtcgccagcgctctcgtacagggcgatttcggatccgaacagcgtaagcggtgcgaagggggacgttccgatcgatcggggatcgagccctgcggcgaagtgttccatggtggtgttgccgactagggcgatgcgcgcgatgcgcgcggggtccacatgcagcttgcggcaaagctcgtcacgcgttcggtcgatgccgctgcgcaacaggccgcagagggtttccatgcccttgacggtgcttgctgcgtcgatgcgggcgatgacgtcggccccgaaagccgcctgcggattgactttgcccgccgtgcccacgacggcgtgcgtttccagatcgacgagattgaacaccatcgtggtcgtgccgatgtcgacggccaatccgaggggggaggattctcccgcgcgatcggcgctcgccttgtcgaaggcttcggcatcggacgccccctccaccctcattgccgcaatgtcttccatgatgagctcggttccgtccgctgcgggggtttggcaggcgagacggtagtcgacgctttcgccgtcgcgcacgagtacgcggcatcgtccgcacgtgcctgcgcctccgcagggtgcgagcaccgtttcgccggcgttttgcaggactttgagcaaggtttgccccggagctgcctctacggagcgtgttgtgccgtcttgggcgtgtatcgtcaggtgcatgcgtgttccttctcgcgttttccctgaggcaatgatatcccatagtccgctttcggcagggggacgaaacgtcttatgtggccgcagcggggaaaataagacgcagcgccctatgactcgttttcgggacatcgatacaatcgaattgccgagccgctctgcatccgatggcgtaaacgaacggatggcgcgcgcagcccatcgatgcgaatcggcgggcatgcggtgcggggttggcttttcatcgacacgcaacgaaaggaaacaatcgcatgctcacgaaacgccagaacctgctcgagtgcatccgcgggggcaatcccgaccgctacgtcaaccaatacgaggcgctgggtctgatcatggcaagccctttgagcgactactcccacaaggaaaccgaccactacatcatcgacgcatggggctgctatcagatgcaaatcgaaggacagccggggttgtttcccatgcacgatatggagcatcgggttatcacggacataaccgagtggcgcgatcaggtgaagattccggggtctgttgacgatccggcgttttgggagccgatcgccgcccgcgccgaagccatcgatcgaaacgagcagttcgtgtgcagcgccatcatccccggcattttcgagcgagtgcatcatctgtgcgaaatcaccgaagcgcttgtcaatttctacgaagaacccgaggaaatgcatgcccttatcgacgagatcgtggaatgggagctgcgcttggccgaagctcacatcaagtacgtgaaacccgacgctttgttccatcacgatgattggggcacccagatatccacgttcatggctcctgaaatgttcgaggaattcttgttggagccttataagcgggtgtacggctactacaaggatcacggcgtcgagctgatcgtgcaccattcggacagcttcggcgaaacgctcgtgccttacatgatcgacatgggaatcgacatctggcagggcacgctgcgctcgtccaacgacattccgaagctcgtcgatacctacggcggcaagatcgcgttcatgggcggcatcgaatcgcagatcatcgacaagcccgattggaccgaagacgaggtgcgcgaagaggtggagcgcgctttgtctgagatcggccgcacgacgagtttcatcccgtgtttgacggcgggcttgaacgatagcggttatccgggcgtatacgacgccgtgagccgcatgatcgacgagtgctcgaagcgcgatttcgcgtaaccgtgtaaacggaagcgcttcggcggcgggagcgatcctgccgccgctttgcgtcagcgcgccgcccgcagcattgcgacggtgcgcgcgagcaggtcgatgcacgaatcgacctcggtggtcgtgttgtagaaggcgggggagagccgcgtgacgttctgcaccttgtaaacctcgtgaagcagcggctgggcgcactggttgcccgagcgcagcgctacgccctgcttgtccatgaacgttgctaggtcgaagggatgcacgtcatcgaccgtgaacgagaggcatcctgcgcgcacggctggtttgccgagaacgcgaacaccctcgaccgactcgagcgctcgctctgcgtaggcagtaagctcgtgctcgtaggctgcgatgtctgcgcgccccgtcgactcgatgtagtcgatggcagcggcaagggcgatggctccgctgtagttgggcgttcccgcttcaaagcgcaggggaagctcctcgaaggtggtcttttcggtgctcaccttgtccaccatctcgcctccgaaccgcacgggagagagttcggagaggatgccgcgtttgccgtacagtacgccgatgcctgtgggcccgagcatcttgtgtcccgagaagcagaggaagtcgcagtcgagctcttgcacgtcgacgtactcgtggcgtatgctctgcgcggcatcgacgagcagatgcgcatcgtgctcatgcgccatatcggcaattgcgcgaatcgggcttacacagccgagaacgtttgaaacgtgggcgacggcgacgaggcttacgttctgggtgtgaagaacctcgccgagcgcatcgaggtccacatcgccttcaggcgtgagcggaattacttcgaatcgtgcccccgtgcgcttgcagagctgctgccaagggacgaagttcgcatgatgctcaagcgctgtgacggcgatggttgcatcgggcttcacccgatcttcccacgcgcgggcgaccatgttgatggagtcggttgtgccgcctgtgaaaacgatctcgtccgatgacatcgcattgacgaagctctgtaccgtttttctcgcttgctcgaacgaggcggtggaacgctcgctcaaggtgtggatgccgcgatgcacgttggcgttgtcagtgcggtaatgcgccgacaacgcgtcgaggacggctgtgggcatttgcgttgtggccccgttgtcgaggtagatgagcgggtgctttccgatcgactgatccaggatggggaaatcttcgcgaaccccatcaaccttgtgtgcgaagtcatgcatggtcgactatcttcctatcgggttgcagcggtttttaccgaatgcttccatggtagcgcaaatctgagcgaaaccgctaagccgttctatgaaaacctggctgcgaaacgggctttcgatgggaagcgactgagcgccgagagcaatgcggtcggcgctcagtcgagagcaatgcgctcgaggcggcgctacatgaacacgatggttatatctttgcgcgccggctcctgacctttgtcgaggtacgctttgccgccgccgatctgcgttccctgagcgtcgtaggacatgcagacccccatgtagggtttcgcgtgctcctgcccgtctttcgccttgtcggctgcgagcacgtacttgttcgccttttcatcggcgaggaactgctcctgaagatcctgcttcgctgcttcgagatcgatcgttgcgttttcctcgatgaacgcttggaacttctcttctccccggatggtcacgttcacttccatggtattcctccttatgccggtctgaacgagaggatgcccgccgatcgcttcggggcgatcggcgggcgcgtgctcgggcggttatccctgaatcgggctgtagagcgcccagcgggttttgccgtccatcttcttggcgagctcttcgatatcgccgtagtacatgcaccatgcctggcaggcttgaacgcatgagggaagcttgccctcggcggtgcggctgtcgcagaggttgcacgccttggtgatcgtggggttgtagacccactcgtagggcgtgtcggcgccgatttccgtttcgtactcgtaagggccgacctcggtcagcttgatgccgaactcgcccttttcaaggccgagttcgttgcggcaggcgacctcgcaggagtggcaaccggtgcaatattcgtagttgatgagaatgcctttcatggttcactcctttagttcatcacggtcacgacgggttcttcgaccggctcgtagggcttgccgggttcgtactcggcaaaatcgcccttttcggctatcacctcgtgaggcagcacatccccctcctggcacgggtagatcttgcacagcatgctcttgatcgccgatccgatgcccccctggccggtgcggaacgcttcggtcatgttgttgaggttcgattcgtaggtgccgtagaagttcggctctgcaccctcctgctcggggaaccaccagccgtgctcggcatgcacgcgtccgggccgcacctcgatggtttccttgactttctgcttgaagcgggcgccgcggctgttctcgacccagatccattccccgtcgcgcacgccgtagcgctcgcaatcctcggggttcaccatgatgagcggccaaggatggaactcgcgcatcgtgggcagctggcgatgctcggaatggaagaactcgaacgagcggccaccgcctgaaaggatgatcgggtagtccttgtaggtttcgggcgtggaaagcgggctctcgggcggctcgatgtggtaggggagcggatcgacgccccagtggtcgtagccgaacgaccacagttcgatgcgacctgtaggcgtgttgaatccgggctgcccgtcggggcgcagcatgcccttttcgtacttgcggtacgtggcatcccaatcccagtacgcggttccgttgcagctgttctcgcttgggttctgcaccgtctcttcccaggtgcggtcatattcggttccgccgggggtgagctggtcggtaaggtaccaggtgcaccattccttgtcgtctttccacggccagtgctcgggtttgatccgcttgccgagctcgaggcagatctgttcgtctgatttcgcctcgtagtaatcggtcaccttgaccatggtgcgcacgggcgtccaccaggtacggcaggagttgcgctcacagctcatggcgacggggagaacgatgtcggccagcgcctgggcggtcggggtcatgaacggatcggccactacgatgaagggtaccttcatgagggctgcgcgggtgcgggcggggtccatcgacgcgcaggcgagcgcattggagctctggatccagaacatctcgatcgaatagggctcgccggtttcgacggccgagaggatggcgtcggaatcggcgcaggacacgatgttcgattcgttgatgcccgatttgtcggggatgagcttctttgcgtacacctcggggtcgatgtactcgtcgccgagtccgtagcgcttctcgatgaggtaggcgcagcggtacagtgcgttgccgccagggttgtcgatattgccggtgatggccatgatgtcggcaaccgcttcggtgacgccgagggctgcgatctgctgttcgaacgcgagaccccactggcatgcgcagctcgaagaggttgcgatgaggcgcgcggctccccgcagcgcttcgggatcgacgtcgcagagggggcttgcccactcgggcgttttgtcggctacgcgttcagccagcaaatcgaacccgtaagtccagcagtcgacgaaatcatggtcgtagaggtcttcggagatgatcacgttgagcagcgccatggccacgatggcgtcggtgccgggacggacgggcagccagtaggcggcgcgggcgccccaccacgtcagacggggatcgacggagatgatcttcgaacccatctgcacgcactggacgagccagtggcccaagaacccgtctgcgttcgacttgatgggctcgttgccccatacgagaatgacgccgggagcttgccagtcttcgttggcatagcggttgtagtgcgcctgcgaggcgtcgacgatgatcatatcgccgtatttggccgaggttccgatcatgcgcgggaggtagcaggcgaagccggtgaagccgaacgtggacacgttcggggtctccatgcatgccgaagcgaaatacggcacctgccagccgatgttgcggcccgttccgtgtacgacgacgatggattgggagccgtgctcctccttgatcttgagaaccttctcggtgatctcgtcgtaggcttcatcccagcttatgcgctcccatttgccttcgccccgctcgcctgcacggcgcatggggtatttcaggcgatcgggatggttgacggcctcgggcatgtcgaggcagcgcatgcagagctttccgttggcgacggcgttgagcgggtcgccctccaccttctcgagcttgttgtctttggtatacagcaaaacgccgcatcccatgtggcatccgggaggcgaccagtgcgtggtgcgcgttacggtgaaatccccctcttgccactgccattcgccttcatggtaagccttgcggtcaagcttatccatatactccttgtagtcggccatagtgctccttccttttcgtctggcaccatcggacgatgccgtgcgtcgcaatgcatgacgcttcgattctatggagcaaggggtttcccccgcatggcgagcgagggcctatttcgcgtgcgcggttctgaaaagcattagcaatgaagacctatttctggcaaaaccgcctgtttggcgaaggaccgagcgtttttgcgggtaaaacgaaaaagggatccgaatcggatccctttcgattttccaagtgcggtaaatccggtttagccggtttacttcggcgcgccgggggctttgggggcgccgggagcgccaggggctttgggtgctccgggtgctccgggggctccaggggctccaggggcacccggcatgcccggagctgcggcggctgcggggagcttctctccgcaggcgggacaggtttcggcatcggctggacaggtggcaccgcatttcgggcagttgcgatcgagtgaaacggcggcaggtctaaaacacatgggcgtactctccttatcgttgctctgctccgacaactcgtccggagcgccttcattatgggcgctccgggttttgcggggcatgcgcagggatgccctatatttgccgccagcctaatacctgaggtattatggttcgcttctgcgaacggttgattagggtttttcgcccctttgtttctttgatcgaatacctaaatttaaccgtatcgaatcaagccgcaagcgggcgcgaaagagatgaaaaaaaccgaggagggaaatatagtaacatattactaatatgacgagagtgtgggacgcgacgggagtttttcttcgccctcggaataggccggcgggggcggtgatcgtatgggggtgataccgttggctgaaagcggagtgaagttgatgggcgaaggacgcagtgcaccggagctcggcgccggtcgggcgtcgtcggacggtgctgggggttggatactcgtcaacgcccgcattctggttggtttggtcggggccgtgtcgtgcttttcgtggttgttcgtcatgctcggcacatcgatattcataccgtttgccgatcttgagaatgcggcaacggggatcgcgcatctcgcatttctcgcaggttgttgcgcgatgctgctcgtatgttggaaattttccgattggctttcgacccacaggatcgtacaggtgggtcttgccgccgtgttcgcgctcgtcggctgcgtcggcttttccttttacgagtttgccgcgtcgtggtacgaagtgttcggcttcgtgctgggctgcagtttctcgcttacctatacgctgtacggcgaatatatctgtttgttcttccgttctgacatcaagccgtacatcgtcggcatctttgcggcgggcgtattcatgtgcacgggcattctgttcgccggccccgagacgagcttcctcttcgcgataatttttcccgctatcgccatcgtcgcctacgcgattgccatggtgcttctgcgcatcgataccgtcgaggtcgtcaaggcgaaggtttcggacaagcgcagccaggttgtatggcgctcctaccttgccacggcaacgtcgggcatggcgctcggcttcgcgctcggttgcatcctgtcgacgcagaacgcgcagtcgggggtgttcgtcgtaatcgaggtggcgctgctggcgacctgcataggcctgctcgtcgactctcttcataaaaacattgcgaacgaaaccgcgacgatgcgcctgttcctgcccttttccgcagtggtggtgtttcccatcctgttcgttcaggaagagattcgcttcgtgttcgccgtcctgcttctgtgcggcgccatatttcccaccacatgctcgctttcggcgatatgccgccatatcgttctatgcgatctttcggcgatacgcgccttttcgttcggccggttgatcagcttcgggggcatcgcccttggaatggtcatatcgttcgccgggttctccgaatctgcgattgaatacttcgggccaaccgccacgacgctttcggtcatcctgttcatggcgcttgtgatcttctcggcatcgtttgtgatgaccgaagacaactatcccgatcagaacaggttcaagcaggcggaggtgaaaagcgagacgggggaggacgagcctgtgctcgtggctgctccgggtacgcccatccgtcgaatcgcaagcgagcaaaccgagccgagcgagagcccggatggcgatgacgcgcggttgacgcgtcctggcatcttctatctcaagtgcgaggcggtcgccgatcggttcgatctgtcgaatcggcagaaagaggtgctcgtcatgcttgcgaaaggccgcaatgccgagtacatcaccgaaaagctcgtcatatcgtcgcataccgccaaggcccacatctacaacatctaccagaaaacgggcgtgcactcccgtcaggagctgatgaacctcgtcgaggaaacggaagtcgatttgtcaggttcggactagccgtcggagcacctgcgccaagcagcgctaatccctggtggcttagcgctgtgtttttaaccattttcaccccatgaaagagcaacccccatcttctatcgttgcgaaagagattgcggatgacgttcgtttcgggcgaacgtctcgcaagcgcattcaagacggaaaggaaggtgcttatgctctttgactacaaggcctttttaaacggggttgaccgcgaagcctaccacgagggcgaatggcaatgggaggaggatggctacactgtaacgaggacgtacacgtactcggctcccggatgccacgattcctgcggcgtgctcatgtacaccaaggacggcaagctcgagaaggtcgagggcgacccgctcgacccgtgcgcgaacggcaggctgtgcatgcgctgcctgaacctggcggagggcgtgaactacgccgaccgccccaagtacccgctgcgccgcgcgggcgagcgcggcgagaacaagtgggagcgcatcacctgggaggaggccctcgacgagatcgccgactggatccgcgtgaacatcgacgaggcggggctcggccgcgagtcgatcttcgtgaaccacggcaccggccgcaacatatcgtcgtgggtgccgttcctcggcggcgcgtgcctgggcacccccaacatcggcgccatcggttcttcgggctactcgtgctacctgccgcgcacctgcggcactgccgcgagcatcggcgacttcccgatcgtcgacgcgtccgagggccacgaggaccgctacgccaaccccgagtggcatcgtcccgacgtcgtggtcatctggggctgcgaacccctgaaatcgaatgcagacgggtatctcggccattggcttgttgcctgcatgcagatgggcaccgagttcatctccatcgatccgcagctcacctggtggggcgctcatgccgcatactggcttccgctgcgtcctgcgaccgatctggcgatcgcgcttgcttggctcaacgtcatcaccaccgaggaactgcaagacaaggagttcgtggactgctggtgcgcctattacgatgagctgaaggagtacgtcgcgcagttcacgcccgagtgggccgccgagatctgcgaagttcccgccgatgtcattcgcgaatcggcgcgcttctacgcgaacgccgagcgcggcgccatccagtggggcctcgcgttcgatacgcaaaacgactccatccagctctgccagacggtttcgaacctcatgagcgtgtgcggcaacatcgacaagccgggcacgaacatcctcgtgcgcaacggcttcgagatcaaccccggctacgcgacggcgcagctgtactgcccgccggagacctttgcgaagaagctcaccgtcgatgtggtgcatcccggctacgtccattttatcggcatggccgactgcgacgcggtgaaccaggcgttcgagacgggaaagccctatcccataaagatgttctggtcgcagggggccaactgcatcgcctgcacggccaatgcggctccgcgcgtctacaagatgctcgaaaacgtcgagttctgcgtggtggccgatccgtatctgacgccgaccgccatagcgttcgccgacatcttcctgcccctgaagaccaccgccgaacgcgactcgatgcgcgtgtggtggaccccgcttcgagctatgaaatcggtcagcgaatggtacgaggccaaatccgacgaagagctcatcgtggcgctcggcaacaagctcaaccccgagctgttccagaagaggtggccgaccctcgaggcgctgctgcaggattacctcgataccggcttcaacatctacgaccccgaaaccggcaagagctacaagagcgcgggccgctcgaaggcgggcatggtggagatcgaagacgcccataccgagtactggaagaagcaccatgcggacggcgagtgctcgttcgacgcgctcgtggagaagggatgctacgaatacgacgacttctgcgatacctactacaagtacgagaagggccttcttcgccccgacgggcaggttggcttctctacgccttcgggccgcatcgagctcgtgccgttcgccacgttcggcgcttggggcatcgacccgtggccgaagcaccacgaatccatccatacgataaagtggctcaccgaccccgagttcaagaaggagtatccgttcatctgcgtaaacggctcgcgatcttacgagttcttccactcggagaaccgccagcaggccacgatgcgcgaattccatccgatgccgcttgtgaaggtgtcgacgaagacggccgaggagtacggcctctccgaaggcgaatggatctggatcgagaacacggagggacggtgccgccagaaggtgaccatcgatccgacgctcaaccccaactacatccacgccgagcacggctggtggttccccgaacaggagccggcatttccgaacctgtacggcacgttcgactgcaacatcaacaacctcacggcatcgtacgagaccggccaaggcggcatcggcaatccgctcaagagcatcgtctgcaagatatacaagtgcgatgagaccgtcgacgaaccggcgccgggtgaggttgtaacccagctgggcggcttccgcagcgattacgttgccgggcagccttttgcgtggaccactgacaatacgacacgcgagggaggacgattctagatgaagggcattctgatcaactacgagttctgcaccggctgccattcctgcgaggttgcctgcaagaagcacctgggcctgcccgccggcgagttcggcataaagctcaccgagacgggcccctacgcctacgagggcaagacgggcaaggaccgctgggagtggacgtggctgccggtcatcaccaaggcctgcgacatgtgcgccgaccgcgccgagaagggcaagctgcccatgtgcgtgcagcactgccaggcgtggtgcatgtactacggcgaggtcgacgagctcgcccggaagatcgacgggacgtcgcgctgcgcgctgttcacgcggtagggcgaaatctgcaccgaaaccgaggaaaaggacgctgccgacatgttcgcagcgtcctttttcgttttggtttgaatcgacgtaatgcctgatcagactacatcgtaatacttcattgcttagcagtttcgccttatttccgatggttttcatccagataggaaatcgcgccccatgaaaaactctccgaatgagaacagaatcagcccaattcgatcccgggtcgaatgcaagcgactcggatgacacggttcgggacaagggcagggggtgagagaaggcacggcccgaacagccataccgatcgagattcaatcctggaggaatcctggggaaaggtgaaacaatgactgaagaaaagaaggggatgcatcgggcttggctcgtcttcatcggcgtttgcatgatgatggccggcggcatgggcttggtgctcaacgttatgggcaactactttgctccgatggcgatggcttttggtttgatcaaccctgaaacgggtggccctgacgttacgcaggtgacgcttttgatgaccgtgtattcgtacgtcatgcttgtttggctgccgttctgcggccgcttgttcgacaaggttgacgcacgcattctgtttggcgcgagcggcatcctgatcgttgccggcttgctcttgatgacggtgtggaccgaggtgtggcagatctacatttccggcgcgctgttcggtttggccggccccgtgatcttcctcgtgggtccctcggtgcttatcaacaactggttcgccccgaagcaggccggcaagttcctcggcatagcatcggcattcaccggcgtcggcacgttcgtgtggtcgcctgttttcgccggaatcatccagtcgagcgggtataagacgggcttcatggtggaagcggttgccgcagccatcctgatcctcatcccggcgttcttcttcttccgcacgcgccccgaagacgtggggttgaagccctacggcatcgagaaagaggctctcgttgatgggcaggaagccaagaagagcggtgtgagcggcaagttcgctttgggcacgatcgcgttttgggccattctcgtcggagccggcctcatctcgctcggcggcggttacaaatccatgatgccgactgccgtgcagtccgtgggcggccctgagctcgcaatgctcggcgccactatgatttccgccgctgccgtcggaaacattctcggcaagatcgcactgggcacgctggccgataagatcggcatccgcaacgccatggtcggtttcgcctgcatcagcatcgtcggcttcctcttgatggtcctgttcatgggcgacaaccagatccccatgctcgtggccggcttctgcatcggcacgggcgatgcgatgatgtctgtcggcctgcccctcgtgacgcgcgcctgctacggcgatcgtcgctacggcgagatctattcgtacatgaacatgccgatcgccatcctcggcggcatcggtgcgacgttcgtcgccatggttgccgggttcaccggcggtttccagaccgcctacggttgcggcatcgtgttcatggccatcgtcggcgcttgcatgttcatcgccgttaccaccgcgaagaagttccgcgataagtggaccgtcgaaggcgaaccggataagacccgcgcatagcccgatagctatgtaataatgtaccggttctgcggtagccgtactgaaccgcagcgatggaagacaacgcgcccgcatcatatgcaaggagcggtgcgggcgcgtttttgcaggaccgccaccatatacgggaacgcgtccgcatatggcaacaatctaaacgccccgtgatctatgtaggatgcgctcggcgcatcgcccgatagataggtgatttccatggaaaaaaaggctccgcgcatgcacttcgcgtgggtgatcatgatcggctgctgcttcatgcaagcaggcggtcttggcgccgtgctcgatgctgccggcgtattcttcgtccccgtctgcgaagacctcggtctgctgcggtcggagatatcgatgtatctgacgttttacttcatcgccaccgtgttcgccatgcccatcgtcggcaagtggatcacgaaatacaacatcaacgtgctgctgagcgtttcattcgccctcgtggtcgtagccgttgcccttatgggcacgtacaccgccgcctggcaatggtggatctccggaatcgtgttcggtttggccggcagcttcatcttcgtcgttcccgcacccattctcatcgggaattggttcaagaagcggcgcggcatagcgctcggcatcgcgatgtcgttttcggggatcggcggcgcgatcctgtcgccgctgttcacggtgttcattcaagatttcggatggcgcaacgcctatttcgtcgcggctatcatcatggccgtcctcgtgctgccgtggacgatgttcgtgttcaagcttcggcccgaagacatgggtctgcgcccgtacggctggaccgaagaggacgagctcgccgagcaggttcgggagcagaagcaccaagaccttccgggcgttccgatcggaaaggcgctcaaaacggttccgttcgtctgcatgttcttgttcgccggcctgatcgcctacttcgccggcttcaattcccacctgccgggcttcgcgcagacggtcggccattcggccttggtgggatcctcgcttctgacggcggtaatgatcggcaacgtggtggagaagctgttcgtcggatggctcaacgacaagatcggcgtccagttcacggtgaacatccagctcgccatggtggcgctgggctttctgggattcatcttctcgggaggcaacctcgtgatgctctacatatcggcgtttctgttcggcgcgcagaattcgctcgtgtcggtttcgacgccgcttctgatccggcagattttcggcgagcgcgatttccccgcgatcttcacctatgcgcgaatcggaacgggggtcatcggctgtttcgggccggtgacggtcggcgccatattcgatgcgactggcagcttcattcctgccttcgtgctgggcatcggcatcacggcgctcggcttcatcgtgacgaggctcgcctacgtctaccgcagacgcctgcactgggtcgatacggacggaacggtgctgcccgaagcgcccgcatcgaagtcgtaggcgcccgggtatcgaagagtcctcgggcgcgaggttcgaggattgcagatcgggtgctgcacggtttgcgccacgggttcgaaaaggcatcgcatcgcggtgccttttctttttcagaacgcataaaaaagcaggtcaaaagctcaataggacaaaaataaacactcaatgcttaggcaaaacgcacctgcgggaacaataagcacatacggttcatgacaggttttccgcagcgccgtatagtgcccgcatgcgcactggtttcatgcgcacaagcagcgagagaggaaggaacggtatggagtataagaccgatgtaggcaagccgtggagatacgaagacggcgaattcaccgtcgtccgcacgtctatgtggtcgcctcccggatgccatccggtcgggtgcggcctgaagctttacgtcgacaaggacggtcgtctcgatcatgtcgagggtgacgagaacaaccctatcaccaagggccgcctatgcgcgcggtgcctggcgctgaaagactacgtgtacaacccgagccgagtcgtctatccgatgaaacgcgatccgaagtttcgcggtcagcatgacaagtgggagcgcattacctgggaagaggctttcgcccttgtgaaggagaagcgcgattacttccgcgatacgtacggcgccgaatcgatggccgtgttttccggcacgggtcgctccggcggcattttggtatccgacatggcccaggcggttctcggcacccccaacgcctgctacacccagtccggctacgcttgctatcagcctcgctcgatgtcctgttcgcacgtgctcggcgcctactatcccgaaatggattacgcgggcggccttgagggcacgtacgacaaccccgtctacaacgtccccgaggtcatggtcatgtggggcaagatgcccctcgcatccaacggcgacggtttgtggggccatgccgtcatcgacctcatgaagcgcggagccaagctcatcagcgtcgatccgcgcgtcaattggctcgccacgcgtgcggaagttcatctgcgcgtgcgccctggcaccgataccgccatggcgatggcgtggttgtgggtcatcatcaacgaagatctctacgatcacgagttcgtcgagtactggacgtacggattcgccgagttcgccgatcgcatcaacgatcccgagaaggggatgacgcccgaaaaggccgcggaaatctgcgaagttccggtcgaggacatctacaaggccgcccgcatgtacgccgccgccaaaccggcttcgatcgcctggggccttgccttcgaccagaatcagaacggcaaccaggcggcgcattgcgtgctcgccctcatggccatcaccggaaacatcgatgtccccggcgggcagatcgtcgccgagatcgatcctgctcccggcgtcgaagacaagcttgcaaccgacggcgagaaggccgagttcaacttggacaaggccgatgcgggtgccgatgacaactccgccgaggatgccgcacgtcccactcgccgtatcggctgggacagcctgcctgaggaccttcgcgataagaccgtcggctacaaggagtatccgctctacgtggaaaacatacgcaacgcccaggccgacatcatgttcgatgccatgaccaaaggcgagccttaccggattcgcatggggtggatccaatcgaccaccctgcttgcgccgacctgttgcgcgcagccgcatggctggtacgagggcctgaagaacctcgagttctgcatggcaaccgatctgttcatcactccggctatcgaagcggcgtgcgacctgttccttctcttggcatcgtgcgccgagaaggacgacgtggtcatgacccactacggcggatcgcccgtgttctacggagccgtcaacaaggccatcgacgtgggagaagtcaaggccgacatggatctgatcatcgagctgggcgaatacctggggcaggattgcctgaaggatgaaaacggcgagcgcatgttcaaggacctcgaggatttccttacccagcgccgcacgtccggccccatccgcatggatttcgacagtctgcgcaagaaggtcggctaccagcgcggcgtgaactaccgcaagtacgagaccggcaagctgcgccccgaccgtcatcccgggttcctcaccccgaccggtcgcgtggagctgtggtcgacggcttatgcgaactacggcgaggatccgctgccctattaccaggagccggcattcagcccgcataaagatcccgagctggcgaagaagtaccccttcatcctcaccacgggtgcgcgcaactacgcgtcgttccatgcggagcatcgccagatccccgtgctgcgcgagctgcatcccaacccgatcatcgagatccatcccgaagacgccgtcgaaatcggcgtggccgagggccaatgggtcgagatcaagaacgatttcggacgtgctaagttcaaggccgtcgtgtcgcccatcgtgaagaagggtaccgttcagaccgatcacggctggtggttccccgagatgcccgccgacgacgaggcgcgcgacgagctcgtgcccgtcggcgagatcctggaagacggccccttggagttcgacatcaacggaacccacattcgcaacgggtacgtaaaaaccgaccacgccgacgagaagggcctgtacggcctgtggcagtccaacgtgaacgacctcgtgtcgaaccactacaactcgaagctcgggtacggtgggccttacaagtgcaattgctgcagcattaccccgttgaaggagagctacgacacggacatggaccttgtcgtcgaaaaattcggagagttggtgtaaccatggctgattacggacttttgatcgactacgagtactgcaccggctgcgagagctgcgtggtggcctgcaaggaggaacacaagcttccggtcggcaagtggggcatccgagtgctcgacgacggcccgtggcagaaagacgattccggagaaggcggcaactgcttcaactggaacaagatccccgttcccaccgatttgtgcgacctgtgcgccgatcgcgttgctgcgggcaaagacccgacatgcgttcatcattgccaggagttctgtatggagttcggccccattgaggaactggcggcaaagctcgccaagaagccgaagcaggtgctgtgggcaccctgcgagtagggcgctctcgggtgcatgcctcgggcgcatgagcgctggggttagatagcaggatcgaatgatccattttgcgggtgccgcgcgattgctgctcgtgcggcacccgtcgagctggaaggtgcgaggccgcgtccgcatggagcggcttcgcgcgcaggcgacgagttcagaaaggctgcatgcatgtgctactgctgtaatttgtgcaataggtgcgggcgagctgacgagatgaaggacaggctgggcaaacgagagtgcccgacctgcggccgccttgagcccgacaacgacgtgcgcgtctgtcccgagtgtggcgcagcgctgccgcctcccttcccgccgttgccgagcaatccgccttctcgcaaaggggcttgagctctgcttgcagccgatcccgaaaagggggaaggcttatgaagatcaaggatcggaccgtactgaagaacctcggatcgtgcggtttcgggggagcgtccaacaccggatgcgtcgatgtgctcgacggcaaggtcgtgcgcattcgcccgctgcactacgatgagcattacacgcccgaagatctgaacgaatggcgctacgaggtgcgcggccacacgttcagaccgggcatgaaaacgctcttgccgcctctgtcccttgcgtacaagaagcgcgcgtactcgccgaatcgcgtgccgtatccgctcaagcgcgtcgattgggatccggcgggcgatcgcaacccccaaacgcgcgggcttagcggatacgaacgcatcagctggaatgaagccaccgatatcatcgccgccgaaatcgagcgcatcgggcgcgaatacggacggaggtccattctcatccagggcgaggggcacggcgagacgaaagttgtcagcggcgctcacggctgctcgtcgctgatgttggattacgtgggagaggagccgggcgactacctgatccaggctcgtcaacccgatagctgggagggctggtactggggtgcaaagcacgtgtggggcatggagacccacgggcagcagaatccccaggacaacgttatcaaggatgtgagcgaaaacagcgatgcggtgctgttctggggcgccgatcccgaaacgacgccgtggggctggggcgggttgcagccgagccgcctgtgttactggttcacggaaataggcgtgaagcagattcatatcgcccccgatgtgaactacaccaacgccgtgcatgccgacaagtggatacccatcttgccgaacaccgacgccgcattccagttggcggtggcctacgtgtggatgacggaggggctttacgacaaagagtacgtggcaacgcacgtcgagggtttcgactggttcgagtattacgtgctcggccatgaggacggcattcccaagacgccccgatgggcttctgagaaatgcggtgtcccctcgtatcgcatcaaggcgttcgcccgctactggggaaagcacagggtctcgatcgcccattgcaacggaggcggctacatccgctcgtgcttctctcacgaaccggctcgtctcgaggtgtgccttctgggcatgcaggggcttggcaagcccggcgttcaccagttcaaattcatcgagtgggtgctgcagggcgtcaaccccgttcccccaagcgagatataccctacgctcatgggagtctaccacggttggcgcatgggagcgcccaagcacttcattccgaaaaccatgacgcccgatgccatcgtgggcggatacacgcacgaaaacccgatgacgtggttcggtcacgtggtgtgcttcatgaagcgcgaggaccagttcctcgaattccagtatcccgaacccgatgcgcatccgatccatatgatctggagcgacacgccttgttgggagacatgctggaacgggggcaatgcgtatcaggatgccgtgcgcgatgagagcatagaattctatctggtgcagcatccctggatggaaaacgacacgcttctggccgatatcgtgctgcccgtatcgacgctgttcgagctcaaggacatccaggcggatatcttctcgggacaatggaacaagataatctacgaggatcaggccatcgagcccgtcggcgaatcgaagggcgattacgaggcggtttgcgagatagcgaagaagctcgagctctacggcggcgaatacgagggactctacgaaaaactcacgtgcggtcgcacgatcgatgaggatatcgagtacggctattcgatcagcgaagtgccgcttgacgagtatccgttcgagaagctcaaggagcagcagtacttcgcgtttcccaccaaaaaggattgggagaaggatccggtgggactcgagctgttcgcgagggatcccgtcgcgcatccgctgagaaccccgtcgggcaagctcgaattctactcgatcggacttgccgagcatttccccgacgataaggttcgcggccccgtgccccattggatcgaggaagcagacgggcatgaagagcgcatctcgtctgtgcgggcgaaggactatccgtttttgctcgtatccaaccatcccaggtggcgcgtgcatgcgcagcacgacgatattccctggctacgcgagataccgacctgcaaagtgagggggtccgacggttatctgtacgagcccatttgggtcaatcccgccgatgccgaacggctcgggcttgccgacggcgatgtggcgaagctgttcaacgagcgcggagccgtgcttgggggagtgcttgtaaccgagcgcatcatgcaaggcgtgctctatcaggatcatggggcgcgtaccgatattctcgaatacggggcgggcggcctcgaccgcgggggagcgaacaacctcatctgccccagtgcaacgacttccaagaatgcagccggcgaggtgacgaacggatttctcgtgggcatcgagaaggcggatgtgtccgaattggcaaagcgctaccccgaggcgtttgcgcgcgactacgatgcggcggcgggcctctgcgcttctgcgcgcatcgtgaaggaggcatgatcatgggcaaggtttttcttgttgacgttgccaaatgcaacggttgctacaattgccagatcgtatgcaaggacgagcactgcggcaacgattggcgcccttacgccgcccctcagcccgaaacggggcagttttggatgaggctcgaggagaagacgcgcgggcaggtgccggtggtgaaggtggcttacaagccggtcatgtgcgcgcattgcgccgccgcaccctgtgcggaaatctgtcctgacgatgcgttcgttcggcgcgacgatgggctgctggttctcgatcccaacgcttgcacgggttgcggttcgtgcgtcgacgcgtgccctcagggttccatctatttgaatgccgagttgggcattgcgcagaagtgcacgggctgcgcccatctgctggatagcgggtgggaggttcctcgctgcgtggatgcgtgcgcccatgaggccatacgctatgccgacgagggggagttcggcacgctgctcgatggagctgagcctcttgatgaagtgggaggtttgggttcccgagcgcgctacctcaaccttccgaagcggttcattgcgggatccgtcgtcgacttcgaggcagacgagcttctgatcggtgccggtgtgtctctgatcggtcgaggtggcgtccgtttggcgcttgacaccgacgagttcggtgatttcgagttcgatcagatcgatcccgacgaatacgagctgagcgtaacggcatcgggctatgcagatttaaccatggcggttgacgttcgcgttgctgatcgatgcgtgggcgacctcggtttaacgcggttgtagccactcgatcggggttcgctgcaaaagccgatcgtcgggcggggtttcgcatatgcgcgaagccccgccgcttcggaagtcgatgccgataggttggcatcgccgaagcgcccgcgatggcgtgccgtcgcaggtcatctgcaacccggctgtgggttgggcgcgttagcgagctggttgtgggctgggcgcgcattgacggagagacgggatcgcgcatcggcggcgagctgggcgcgcatcgacggcgagctgcgaccaggtggccctcgcgtggcggtcggtgttttgctggcagtccgtgagatgggcggcgagcattcgggtggatgccagctgactgcagcttggaagcggatgcgcgccgatctgcacagtttttgccagattcatacatgcgagcgaacccgatacgccttcgaccttcctcttcgcatgtaggatgcaccatatgcccagttcacgatatgcgggcttgacccaaagggaacacgtgcggtcttcatatgtatgaatctggcaaaaactgtgcagatggaggccttccgagttttcgtgcgcgatcgtaagctatgtgcgcagcgaacgtgcggcgcatgcgggtttaggtgcgctcgggttcggcttttcgtgcactcggcgtatggcaggtttcggtcgttctcgggccagggtgggtcttggggactccagggtgtttcgggctcgctcgggcgggttggatttcgggggctccggcgcgcgctggacctcctcccggcggcggtgcctcgagcgctcattgcgaggcgcggcctcccttcgacgggggtcggtgctggatgggatttcacaccaaacgaacctcctatggcgcgaaaacccttcattcgtatctcgcggaaagacccagccgtcgcctgagtttcagcatcttcgcatgatggttggccgtgcgcacttgccggcgcttccccagatgctggcgaatcgtttgcgcaatcgtttccgttgcggcaatgctgtccaattcggaattcgtcactccgatcacggtccatcccatggacatcaaggcgttcgttcttctcgaatccgccagcctgctttcttcgccttcgtggcattctctgctctgatattctacatcgagcttatgctcgggccagcacaggtcgcaccgaaagctcgcctttcccgatattgcccgtgccgcttcgcttgcggggaccgtatggttcatgtgggggatgccgagcccctgtcctccgtagctcatgggcagcccgaggatgagggcttgttttgtttcgcgtgctgaagcggagccgtcggcaaggtagcggatcatgcgcgccgtcctcgccgcgccgttgatcgaagggtttctcgatagatagttttccagcgtgcgaacggataggagcgctggaacctgatagcgagacggcgcttccgtccgccaggtctgatacgtcccgcacatttcgtagccgagttcgagaagcgatacggtatctttctccagcgatgctttctgtataaaggacaacgcaggcgagctggtgtaaatatcgtaagcgagccggtaaaacgaagtgcctgcaaggtccgaagagcacatgtgcggttcgcaaccgtctgaggttcggcctttcgagcggttgttgacgagaacatgcagcggtctgctgacggacaggttcggataggttgattccagatgcccgatcgcggcctcggctcggtgcttgccgggtgctcgggttggcagcgaacgccattttcccttagccgggctgagcgcgcgatggtcgacggaacgcaggattgccaatgctgtttcgtatccgaagtagacgggcgtgtcgcaggcgcatcgattgacgttatcggcgtgtgaatcggcgtctgcatggaaaatcgatcgaaccatgggcgtgatcctctctcgcccttaacggaagaggatcttgcaggcgtggtaggggaaacgagggcagacgtttccacgatgggccgcgccaaaaaggggcgcctgcactggctctgtggtgcagcgattctatcacggcgggggtgcatgcggtcaaaatctgcacggtttttgccagattcatacattgagaagcaaaccatgggatggttttcggttcgcattcagcgccgccaaaaaacagtcagccacatgcgcttcgatgaacaggcattactcccgacattattggcaagcgcctgtcggatcgccatgctgctgcgcgacagcatggcaacgatgtatgaatctggcaaaaaccgtgcagatctcggtcgaactcgtgccgatgtcagcgcgtggggcgccgtagtctgtggccgtgcttgtgcgatgttggcgcgcagggtgcggtggccggcatcggcgcttacgtcgggctatcgcatttcgcacggcgatcgcatcccgcatccatttgcgcaccatggcgatgccaacgcgtgggcggatctcttcgtcggcggggctagcccctgcgggtgaggagtgccttcgtgatgcgggagagcgccagcgcgatcaggccgattgcggcgagggcagcgactccggcaagatagctgcccgcccccgatgccgatgagctcatgacgagcggtcccgcgagcgcggcgggaatgagcgatagatttaggatggagaggttttcggcgtagtgcgcttccccgaacgccttggcgataaagcccgatccgacgacggacgtccccccgatgcccaagcccccgacgatcgcgccaacaaccatgagcgcaaccgagtgctgtacgatcgccgccgcgatgaacaggcagcctgctatatgggctgccgcaacaacagccatcgtggcggagatgccgagaagatcgaatgcgaatcctgttgccaatctgccgaggccgttgcatacggagagcgtgccgacgatgaacgccgccagaggtattgcggcgccgatatcgagcgcaacctggttggccgagccgatcaagccgagccctatgctgcttacagacaccatccatgcggcatacagatagaaaaccggacgcttcaacatgtctgcggtggcaaagccggtgtctactgcagttgtttcgggggctgaggcgtcaggggcctcattgcttcgggtgcgtgtccggcggacttcatccgagcgggggttcttgatggcgagcgagagtaggccgatggcgacggcgatgctggcggaaagggcgacgaacgaccaacgccagccgatcgcggcgaaaagcgccgtggccaccgagccgagtatcatggtcgacatgccgtagcacaggagtagcattcccgacgcaaaccctgttcgatcgggaaaccaggggatcgttgcacccatggttgtcgtgtacgccatgccgacgcagccaccgccgagggcaccgtaggcgacgtacatgacccagggggcatcaggctggatgagcgtcgccgtcagggcgaacgccatgaatatccccgctgctgacacgatgagcgcgcagcgcggcgacgtttttctcgccaccttcgagccgatgattcctccggcgcagaaggcccacatgagcacggtgaaagtgaatgatatcgtagtcggatcccagccgaattctgcggcaagcggcgtcgagaacaccgaccatccgtaaatgaaccctatgctgaccatgattgcgcaggcggccaacagccggggccagcgtcggcgatcctgcggcacggcgttttgcaccggcattaccgtttgggcttttcgctcgacacgacccgagaggcggtctctttgcttccgcatttcgagcagatggaggttcccggcgttctgagcgctccgcaattcgcgcagcgcgtctctgctttgacggagaagatcccgcatttgttgcagtgggtgcacggatagcatcccatatcattgcctttcgatcgcgttttgccgaatgacgcaaaccttaccgcgcggcgccttgccgtgcattccccgaaaaggttgctttgggggaatgcgtgctttctgagtaagccctggagactggttttcttcgtttgcgcaggcggtgggtgggcgcgggcggaaaaacggtcgtatgcggcggtcgtgcgcggcgggcaggtgcggcgttgccggcgcagctcatggcggtacggcgatacgatcgccgagcatgttgcccgccttccgggtcgttggttgtggcgtacgctcgtcgcggtacaatatgccgatgcgctcttcatgcgaggcgcgatcaagagataggagtaagtatggcaacggaaaacaaactcggaggcaagatcaccgcattgcgcgagtcgctgcagctaacgcaggacgagctcgcgctacggtgcaactgcgacgtcgaggttatccgcggtctagagaacggcgaaatggcgccctcgctcgctccgctcatcaagatcacccgcgcgctcggcgtgaggctcggtaccctcatggacgatgacgaggcgctcggcccggtatacgtcaaggccgacgagatggaagaggctacgcgcatgcatagtcttgagacggtttcggatgcgggggacttgcgcttcttcagtctggccgaggggcgtccgtcgcggcatatggatccgttcatcatcacgatcaagccgtcgggcgagaccgaccacgtgctctcccagcacgaaggcgaagagtttctctacggcatggagggttgcgtcgagatcgagtacggcaaagaggtcttcgtgctccatcccggcgagagcatctactacgattcgatcgtgccgcaccaggtccgtgcccacgacggccagagcgccaagttccttgccgttgtgtacaccccgatgtaggtgatcgccatggatacgatcgataccgaatacaagggggagcccggctcgcccgactataagctccattcggagttgaccatcggccgctacttcaagaaccaggtggcgatcgatcccgaccacgagttcgtcgtgtaccctgaccgcgctctgcgctggacgtacaaggatttcgatgagcgcaccgataaccttgcgcgcggccttttggccatcggcatgaagccgggcgaccatctgggcgtgtgggcgcgcaacatccccgactggctcacgttcatgtacgccaccgcgaaggcgggcatcgtcatggtcacggtgaacccggtgtacaagagccacgagctcgattacgtgctcaagcagtcggacatgaaggctctctgcgtcatcgatgcctaccgcgacgtcgattacctgcagatcattcgcgatctcgtgcccgagtcgctcacgcaagagcgcgggcacctcaaatcggagaactatccgatgcttgaaaacctcatctacatgggtcccgagaagcatcgcgggttctacagcgtgcccgagctgattctcctcggggagtacctgcccgacgacgcgctgcccgaggccgaggcgcgcttcgacaacaacgacgtggtcatgatgcagtatacgagcggtacgaccggttttccgaagggcgtcatgctcacgcatcgcaacatcctcaacaacggattctacatcggcgagggccagaagctcgggcccgacgatcgcgtggtgttgccggtgccgttcttccactgtttcggctgcgtgctcggagtgatggcaaacctcacgcaccgatcgaccatggtcatcgtcgaggatttcaacgcgggactcgtgctgcaggcgatccacaaggaacgggcgacggccgtgtacggcgtgcctaccatgttcatcgccgagctcaaccatcccgatttcgacacgttcgatctcacgagtttgcgcacgggcatcatggcgggaagcccgtgtccgcccgagaccatgcgcgaggtcatggacaagatgcatgcgaccgagatcacgatctgctacggcttgaccgaatgcagcccggtttttacgcagaccacggtcgacgacgatatcgagcacaagtgcgaaacggtcggtcgcaagcacgagccggtgctcgtgaagatcgtcgatcccgataccggcaaggtgtgcggcacaggcgagcctggcgagctgtgctgcaaaggctacaacgtgatgaagggctactacaagatgcccgaagaaaccgccaaggtgatcgatgaggagggttacctgcattcgggggacctcggcacggtcgacgaagacggttactatcgcgtgacgggccgcgtgaaggatatgatcattcgcggcggcgagaacgtctatccgcttgaaatagagaacttcctgctcactatgcccggtgtgctcgatgcccaggtggtcggcatacccgatgagcggcttggcgagatcgtcggcgcgttcatccgcacgcggccgggatatgaggatatgacagaggaagatgtgcgcgcctttgcgattccgcgcatcgcgcgctacaaagttcccaagcgcgtgttcttcatcgacgaatttccgatgacgccttcgatgaaggtacagaagttcaagctgcgcgagatggccgaggagtacgtgaaagcggggaagtaggagccgccgtttagcggaaggcggcagcaatgtacgacctgcggggtgccgatgcggcgccccgcttcgcgttggcggctgatcgctcctattcgcagccgacggcgggatgggcttcggagtgctcgagcatggctttgagttcttcggaggtatgcacgccgagttttttgaagatagagtatttatgcgccttggcggttgatggcgagatgccgagcgcgttggcgatgtaggtgggattgcgctcgtttgccagatagcgcaggatatggctttcgcgttcggtcaggtcgtattctttttccagcgtaaggatggccttcttgcgtctgccgggcgcactgccgccgatgatgtcgtacagaggagtgcccgagcgggagtattcgatgtcgtcgagcgcgtcgatgaggtcgacaaggtagtgtcccatctgctgcttgctctcggtttgagcgaggtatccggggatggcgttgtagagtattgctgctgcttcgagcactttcgattcgctttctttcatggtgcatgctttctgtaagaaataatactgataggtattataaatggtaacgccgaactatgattcatgaaagcattctttttcttgaaaaacgctatttctgattggcgtgctttaaataagtgttttaactggggttatcaatgcagaaagatcccttggggacaagggatctttctgttggtgcttcgataatctgatccatggagtattaggccatggaaaccaggccttacgggatgaagcaggtaactttgtttccgtgctcggccattttggccgaaagctcttcgacgggcacgagttccatgcactgggcgaggcaatggtgaacgcatgcaggctttttgcctgcggcaacgcggtcctcgcacagatcgcacaggtcggagggaacggggacgtaatcccaaagccacttgtccttcattttcacggggcccatttcgttgagcttgatgccccattcgtcgagcgggatatcgtgctccttgcggcacgaaacttcgcatacgtggcagccggtgcagtacttgtaatcgatcaacaaggcgtattcgttcatgctaggcctccttccttgctgctacggggcttgcggagtcggtgccgatcgcgccttcgacggtatcggggctcaaggtgccgagcgcatcgaggctgtcaactttggatatcttgcataagacgtttttgaacggcgcgccgaatccgatgcgcccgatggcgcgatgaggaatgaggctgttgatgttcgccttccatacgccgttgaggttgggggcttctgcgtcttgctcggggaaccaccagccatgctgcgcatggatgacgcgcggatcgacgatggttgtgatcttggctttctcgatggccttgccaagcgggttttcgatgcacacccagtcgccgtcttcgataccgtacttcgctgcggtttcggggtgtatctgcacgagaggattgggcatgatggcgcgcagcgacggaacctgacggtgctcggagtggaacgaagtcgtctcacggccgcccgtggtcatgatgagcgggtattcttctgccagatcgggcctgctgtagggtgtcagcgcgttttcctcgaaatagggaagcgggtcttcgccccagtcctcgtagaggctcgagcacagctcgacgagacccgtgggggtgttgaagcccggttccccgtcggggcgcaagagccccttctcgtatttgcggtactcgaaatccatctggagccaaccgtcgttctggaggtcttcgaacgtcatatccacgccgccgttgtgcagctgctcggtgaagaagtcggcaacgttatcccatggccaagcctgggggttcaagcgcttgcccaccaagaagtcgatctcgagatccgatttgcagtcgcctacttcgacgcatttgttcatggccataaccatgtgcgtgttgcggccgaagtggggtagcaccataccgtcgtgctcggcgaaggtagtaacgggtaaaaacaggtcgcacaatcccatggcggtcggcgtcatgaagacgtcttggcatacgttgaactccattttttcgagcgccttgaaccagcgcttgccctgggcgttcgtcgtgttggcgatgccgttggttgcgtagaaccatgccatcttgagcgggtagggctcgtcggtttcaagcgtatcgaggatgcaatcaggatgtgcgatgagatgcgctgcgcggaaccctttgtacttcggatcggtgatctgcttctcgagcatgccgggaggcagctgttgggcgcattcgtagcgccatttgcccatgaaacttgcgggtacggcaagcgtgacgccgcccggcacgtcgagatcgccgaggatcgcggccaagatgagcacggtgtggcctgcctgcacaccgttgctgttcgtgtcgatggcgagtccccacatgaacgaggatgggtggttggtggcgatggcgcgcgttgctgccgcgatagtctcggcgggaacccaggtgatctcctcgactttgtcgagggggtattcggctgcccgctctttgagctcgtcgaatccgtagcaccagttttccacgaaatcgtggtcgtagaggtcttcttggatgacgaggttgatcatgccgaggccgagcgcggcatcggtgccggggcgcagctgcaggtggtaatcggcgtgcgcggccatccaggtgacgcggggatcgatgacgacgtatttggatccgcgcttcatcaggtcgataagggtatggccgaagaatccgtccgggttcgagaagagcggatccttgccccagagtacgatgtatttcggcacctcgtagcgcgggtcgtcgaatcgatcggggaagaacgccgcataatcgagttcgggatacccggctcccagaataaagtcggccaccgagcagcgaggcccatagcatgaatcgccgctcatcgggaaacacgagttgggcgttccgagtgcagcgtaggccagcggcgttttgtacagcgtcgcctcgcggccggttccctgaaacgctacgatggattcggcgccccagttctccttgacgtaggccactttctcctcgatgatgtcgagtgcctcatcccaggtaatcgccgtccaggcatcttttccgcgatcttcccgcttacgggtgagcggggtcaggatgcgcttttcgttgtacatgtactcgggaagcgtcaggcagcgcacgcacaggcgcccctgtgtgatggggtggtcgggatcgccctcgacgtcgacgactttgccgtctttgaccgtgaggtacatgccgcatcccacaggatggtcgcccggcggggaccatgcgcaggtgcggcacttgacaacgccatcaccgcaatcgattatcctttccgacataatctctcctctctccttgttctcgttctcgtcttgttgtatgcagtgcgtctgggtagggttcttttattcgaaagcgctagaaacccagattgcctcagacgggatgccgatggatcgaaccctcttcggctaggcgccgggggttttcgggggctgcgctttcggggcggcgggtgccgcgggggcgccgggggcttttggagccgcgggggaagcgggggtcggtgcttgaggggatgcgctttcgatgccctccgtcgaggttttgcagaaggggcatttcgagggaagctgcccggcaacgcgattgatgcgcttcccgcatgaggggcacacgacgggcggtagttctgtttcggctggtctgaagcacatgggagtacctttctcgcggaagttgtgtccgatgatcgaagccatacctaatctaataagtattagagtatgaaatctgatgagaataaaataatactaatccttcctattgaatagtaccaaataggattagatattatacttttttataaatagttgatatggactaatagaggtttaaggctacaaatcttagtatttgatcaggtaaaatatagccacatcgcgacaaacagccgttatattattcttaaaataaaataaatacacctcttgtcgaatcatactaaaaggtattattttgatcacgtcaactaagacgataaagactggtactaaaaggtttattttaggagttgtccatgtgtttcagaccagcagcagtttccatgaccgttacctgtccgaagtgcggtgcagaatgcgcgcttgacgcaaagacgtgctctgcatgcggagccgatcttcccaacaccccctcaatgcccggagcacctggagcccctggagcccctggtgctccctcgacgccgggcatgccggcagcgcccggtgcaccggcgaaaccgagcgcccctggggcgccgaaggctcccggggcgccacgatagaaagctttcgaaaaggcgcaggttttttgcatcccgctgccttttcggttgccttgcgagtttcctcacaaccatcgaagacgaatacgagagaaagggaggagcatggattatcaagaattcctcgattcggtagaccgcgaggcctaccatgagggcgaatggcggtggcaggagggcgaatacaccgtcacccgcacaaaccactggtcgccgcccggatgccataacggctgcggtgtgctgctgtacgtggacaaggaaggcaagctcgctcacatcgagggcgatccgctggctccgttcaacggcggtaagctttgcatgcgctgcctcgacatggtggaggcagtcaaccatcccgaccgcttgaagtaccccatgcgccgtgcgggtaagcgcggggaaaacaaatgggagcgtatttcgtgggacgaggcctacgaggaaatcgtcgaaaaggtcaatgccgtcaaacgcgatttcggatcccataccatcctgttcgtgcacggcaccggccgcaacataggatggcagctgccgcttttcgcttcgacggcgctcgagacgccgaacgtctgcaatttcggctttaccggtttcgcctgctacctccctcgcatgatcggcgcttccgccaaaatgggcgagatgaccatcatcgacgtatccgaaacgcacgaacagcgctacgccgatccttcgttcaagcgccctgaggttatcatggtttggggcaacgagccgcttaaggcgaacgccgacgggttcttgggccattggatcctcgagtgcatgcagatgggcacgaagatcatctccatcgatcctcgcctcacttggctcggtgcgaaagccgagtattggctgcaagtgcggcccggcaccgatggtgccctcggcatcgctatgctcaacaccatcatcaacgaggatctggtcgaccatgagttcatcgatctgtggtgctacggctacgagcagcttgtcgaatccgtgcagggcaaggacgccgattgggcggccgagactgcggcctcgatgccgacgacatccgcggcgcggcgcgactgtacgcaacggccgagaacgcgtccatccaatggggtcttgcgttcgagcagcagctctcggctctcggcgttaccgccgcagcatgcgacctcatgggtgtgacgggcaatatcgacaatcctggcggcaacctgctcatcaaatgcgcattcgatattgaaaagcgctacggcctgggcgatttcaagatcccgcgcgaaaactacgccggaaagcttaccttgtcagcgggcattgaatcgtcggacatcgtggcctgcgcctcctccgacgcgcttttgcacgcggttgaaacgggcgagcccttcatgcctcagatcatctggctgcaaagcgccaaccctctttcgtgctcgggtatggacgcaccgcgtatgtacgaggctataaacaagattccgtattgcgtggtggccgatccgttcatgacgccgacggcggttgcccacgcagatatcgtgctgcccgtcgccatgagctgcgagcgcaactccgtccgtacttggtggacgcccgcccgctcgatctccaaatgcacgagttactacgagtcgaaatccgacgagcagatcattctcgaactcggccgtctgctcaagcccgagaactggccgtggaaagacgacaaggagctttccacgtggtatctcaccgaccagtacgccgaaggcggcacccgttacgaaggcgatttcgaagagctgcaggcgcggggcggctataagtacgacccgtgggacgccgagtactacaagtacgagaagggcatgtgccgaccggacggtcaacctggatttgatacggctaccggccgattcgagttttggagctggggatacaatcactggggcgtcgatccgatgccgtatcatctcgagccgaaggacagccccgtctcaacacccgagaagttcgaggagtatccgttcattgcgacgtcgggcggccgatcctacgagttcttccattccgaacatcgccagctcgagaccatgcgcgaattccatccgtggccgcttgtcaccatccacccggatgccgctgccgaatacggcatcgaggatggcgattgggtgtggatcgagaccacgcatggccgctgccgacagaaggcgtttctgttccccggcatcaagcgcgacaccattcatctggagcatgcgtggtggtatccggaggaggagcctgccgagccgagcctgtacggcacattcgattccaacatcaacaacatggctttgaacttcgagaccggccagggtggcatcggctcgggcatcaaaagcttcctcgccaagatttacaaatatcaagagggcgatcagatgccgggcgagaaggtaacgcgcgaaggcggctggggcgattacattcccggcgtcatggctggcgataaggagtctgctgagaagcaggcggccgagggcaacgacgcgctgcaaaagcagctcgagaacgcgcgacgcgttcagagcctcaaggtgaaagacgccgatatgcaaggacgcaacgcgctcgagtatgccaaggagcatgccgacgaggttatcaaatagaggaccgcgaagtttagagaaaaggaggcgaacaaccgtgaccaaggcgattctcgtcaattacgactactgcacagggtgccactcctgcgaagtggcgtgcaaaaagattctcgatctgccgaaaggcgagttcggcatcaaggtgtgcgaagtgggaccgttccaatacagcgagcgcgagggcgtgaagggcatctgggagtggacgtacatgcctgtgatcacccaggcgtgcgacatgtgcgccgagcgtaccgagcagggcaagatgcccatgtgcgtgcagcactgccaagcgtggtgcatgtactacggcgaggctgaggagcttgtcaagaagatggacggccaaacccgctggtcgcttgtaaccgtcaaagaataatggggattggcgcgggcgggaaagtcgcccgcgccttcaaaagggggcttcccggcaatctgtcgagcggacgcgaatcggcttcgcttgaccgagcgggaagtgcggggaagcacccgcagacacattgagggaggaatcccattgaacatgacagaccaagtctgcgcgcatgttgttgcgacggactatgcatcgcttgatgctttcacgattgcgcgcgttaaaacgcgcgtcctcgatgcggcgggggtcatcgcggcgggcgttcacgcgccgatgtgcgacgaattattcgatctgcttaagagctacggatcggcaccgcagagcgcggcgttctaccgaagcgagcggatcgatgcgccgtctgcggccatgatcaacagcttctccatgaggtcctatgatttcgaggctattgaagcggaaaacgagaatcggaagagcagtgccgctcacatcagcggtacgacggtgccgacggcgctcgcctgcgccgaacgcgcgcacgcaacggggcgcgagttcatgtgcgctctcgctttgggagacgatatcgcggcccgcctgggggcggcatcgggcttcgacgtgtacgggggctgggataacaccaacaccatcaacgggttgggtgccaccgtcatcgccggaaaactgggaggcttgaccgaaaggcagcttaacaacgcccttggtcttgatctcaatatgctcggcggctcgatggacaacatcaactataagacgcttgcattcaagctgcccatggcgctcgctgcacgtaacgccatcttctcggcggatttcgctcgtcgcggcatgacggcgactcatgacgcgttgaacggcaagaaggggtacttcttcttgttctgcggcgaaaagcagcgccccgagcttctgtgcaaagatctcggcaacgtgttttacggcgacgttgtcatcaagccgtggtcggcctgccgtgccacccacccatccatcgatgcttgcatgcagatcgttcaagcgcacgacatcgatcccgaacaggttcttaaggtcgttatccatacgacgccgcgcacggcggccggttttgtcggccagccgttcgagatcggcgaagagcctcaggtaagcggtgctttcagcattatctataccgcggcggtcgccatagcgacgaagtcggtgcgtccggattacatgaaccgcgaggcgatggaggatccggctctgaaacggttgatcgacaaaatcgaaatcgtcccgacgctcgctccagacgagtatcagacggcagaggtcgacatcgtcatggcggacggagccacctatcacgcccgctgcgatgttcccaaaggcgacatatacaagagccccatgagcgaagaggaggtgttggacaagttttatcagaacatcgagttctcccagacgctttcccgcgaaaacgccgatcgcgttgtggagaccgtatcgcgcctcgaagagctcgatgacatcggtgagctcatcgagttaatgaggtaactcgatgggttcaggggacaaggtcatagtaaggagaatgaaatgaccgcagaacaaaaggctaaaaccaaaaaggctttaggcgttaccgttcagatcgctgcgttgctcgtcatcacgcttcagtatgcaaaatcgttttcaacgcctgccatgtcggctatcggtgaagcgtttgcgccggcaggggtcgattccctcatgctcaagaacattgagggccttccttcgctcatggccatcgtcggtgcgtttgccgtcggcatcatggagcgttacatgaagaaaaagaccatgctcatcatcgcgatgggatgcacgcttgtcggcggcgtggctgcaggcttcatgcccgaaaccaccgaaggtttctacgggatactcgtctgccgcgtcattctcggatttgggcgaggcatgatcttcccgatggcatcgtcgtttatcgccgacctgttcgaagggaagcagcgcgatcgcctcatgagcttcaagacggccgttggcggtctgtccggttcgctcttccagctgatcggtggttttctggccgtgctttcgtggcgctactcgttcatcggctacctgtttatcgtgcccatcattctgatgattgtgttctggctgcccgagcctgatgtgaagcccgcaggtgtgacggctgacggcaaaaagggcagtgcgctcaaatccattacgatagccgcatgggttgtcatattcctcgccggcatctacaacttcttccagttctcgtatttcaccaacatctctttgtgcatcaaggaagccggtttgggagataccgggtttgcgggcatcatcagttcgacggagacgcttgcttctgctgtgggcgccatctgctacggcgcattcctcaaagggcgtctgcgcggattcgatcttccgattgcgcttatcggcgaggcgatcggcttcttcatcctgaccaacgtgataagcgttcccggctattatgcgggcgccatcatctacggttttgcgttcggcatgttcaaccccgctcttatattgcaaatcgtcaaagtgttgccgaaggaaggcgctactttgggcttgtcgctcctggctgccgctcagaacctgtgccagtacttctccgcctacgtactggcatttcttgccggcatcatgggcgttgcagggacgggtcagcttgccggatggaacgtgtcttggcctctcgcgacagccatggcggtgctggttgccatcattatcgtcgcaaccaagaccaagcaccccgagctgattgccggactgcgcgaacctgcggctcctgcgctcgatgaaaggaaagacgagtaaaatctcagctggccttaacggcgcggcgatacgaaatctgtgggggtttcgctgcgcaggctgatctctcaaccgccagcgtagaaaaccgatccacagcatagacacgtatctgcattgacggaagccgagcggtctcagctcgctcggcttccgcgacagggggaaggaaatgcgatggcgcttgtcagcaatggcaggttgttcggtaggattcactatgcgtttgtcatcatggtgtgctgctgtttggtccaggcgttcggtatggggcttgttctgaactgcggcagcctattctatgtgccggtgtgcgaggatctgggatttttgcgctccgagatatctacatacatgaccggttactttatcggaacgacgcttgtaacgcctttggcaggcaggcttcttacgaaatacgatacccgtatcgtcatgtctgtggctatcgtagtgctatcgggatccgtaatggccatgagcacgtacagcgagatctggcagtggcaagtctcgggctttttggtgggcgcggccggcgccggcatcttcgtgctgccttcggcatcgctgatcggaaactggtttatcaaacggcgcgggttcgtatacggcatcgttatggcgtgttcgggcgtatcagctgcgttgttctccatggtgatcagctcgatcattcaaacggcgggctggcgatcggcgtatttgttcgtcggcattgcgtctttggccgtgatcctgccgtgcagcttgctcatgcgcaagaagccgacggagctggggatcgcgccgtacggatatcgcgaagaccccgacgacaagggaacgctgcccgttatgcgcggggtggcgttcaaggcggccgtcgtctcggttgcgttttggtgcctgttcgtgtttgcgggcatcgcgtcgttcatccacggaggcatcgatcagcatatgcccggctatatccaatcgataaggttcacggcatcgtttgccgccatcatcgtttccgccgagtcggtcggctcggtgatcgacaagctcgtcatgggatggttgaacgacaagatcggcgtgcggaggacgacgttgatcgagctcgcccttattgctatcggcatcgtcgggttcctctatttcagaaatccggtgttcctcgttttgtcgacggtgttgttcggcattcaggattcgcttatgtcggtaagcctcccgctgctcattcgcgatatcttcggatcgcggaactacactcagatccatgcttggattcgcacgggcgtcggtttgttcgggtcgttctcgggtgtgctggtgggcgctgtgtacgatacgaccggcacgttcgtccccgcgttcgcaggccttgttatcacctgcttcgttgccatggggtgcattgtgcttgcgtatgcgaagcgcaagaagcttgcatgggaaaccgacgaaggggatggtcttccggttgggtcgacggccgatgcctatgattgcgcacgcgacgcatcggttcgtcgataggatacggcatgtgctatccgtgttcgcattgcggtgcctgcaaagtgaagctgccgaaggggaagtgcccgctttgcggagccgagctgcctgagggcggcgtctgccccggctgcggaatgaggatgcccgcaccgcccggccgcgcctcctctggaaaacctgtgcaagatgcgagcggcgatgcgactgcagcgcctgaggggggacggttttgaccatgtgctaccagtgctctggctgcggaagatgccttgaggcgcaatcgggtttgccgagtgcgcctgtctgtccgtgctgccgcagagaggtcgatcccgatgtacgctactgcccttcgtgcggcgcgtttatccgtccgcgagcaggcagtgtgaaggtggcgaatcgtcatgcgcctaccggttccgagcatcctttgccagactcgaggaagtcggaaagatgaaacaaggcgattaagctgattcgtgttttcgggctatcgaggtcgaggccctctctctccgttacggatccgattctattcaggacggtgtttcgatggatgccgagagcatccgccgtacgcgacgcgctgcattcgtggcgcaggtagcaacggaggatgtccccgtcggacggattctttctcggcgtgctctcttttatgcgggcgagcgcgctcgtgttgaggcagaattccaggaaggcgtagtctttcccccgctgaacagcagatagtcgaacaggtagtcttcgaagcgggcgaacgggtcatgcttgtcgaggctgtcgtgttcgggcgagcgcagcatggcgctgtactcgaatgcgatggctatctgccgggctcccttatcgaggttttgcagttcgggaagagggcccgagatcgccgcatcgacataggagaagtcaatcagggcggacaaggcggctctgacggtgcggtctgctttgccgtcggactttcgggcttgcacgacaaggtaggccgcaccgtcacgcaaaacgacggggttgtcgggcagcatcgagctgatcctcctggctagatatccgaggttctccgcatcggctgtcttcggttttatcgcatataggcgaacggcgccgttttcggacagccctatgctgcgcgcttgccgtgcgatgatatccttcggcatcgtttttcccgccagcagtgccgaaagaagctctgtgccctcggcgtatgtttcgctttcgtaggattggcagcgtcgtatgtgcgctttgatatgggatgcgagaatgtcgaacgtatccagaagcccctgggaataagggacgttgttgcaggtcataaccatttgaacgaagtaggcgccgttgatcttgaacacgtggttcatggacgggtattgcgttatccgatttccagagtaatgggtctttccctgcttcgcccatcgcgagagcgctttcgtttcccgaaaccgcgctatggcgcgttctccgtggaagcctttttcgatgagttcgtttgtgatggggtcatcgatcggcatatcgggggtatacgcgatcagacgatacgtcgagtccgacatggttacgaggttgcccaaaacgtcacgcgagatatcgagcatctcttggtagcttcctctttcggccgatattctgtcgagatcgtgttcccatcgatcgattgtgcggatgcgcttttggagggccgaggcaaaagcttgcttcgagaggttcgtctctgccgctatcgcgttgcgccgatgttcgggcagcggcgcttcggagagcttcttgcatacgacgatgatcggaatgtcttctcggatgtttcgaatctcccgatcttcctcgcatacgaggatcgcacccttctcgaaaacgacgttttcttcgccggtaacgggaggcaggggctcgatccattcgattgctcccggggagaagctctggcaacgagcttctcttgaaagggattggatccagccgatgagcatagccggggttgtcatgatgcagctcccttggattaggcaatatgcacaattttatatcaaattaaaggcgaatagcctattaatgactgaaatagaggtttgtaaaatgagtgggtagtatcgatgctttatgcagccggacggaatgggggcgttgtggatttcgacataaagacaggaaaagacataaagctcaacgtgaggcctgtgacggtttgcctataccacgagtatgttttcgagggtccttgcaggttcggcgtgggcgatcagcttaccaaggaattcgatttgatgaacgccgccgaaaggcaccgtgcgttcgtcaacaacgtcaacaaatatatcggttctttggattacgtcaacgtcatggagccgataatgatcgggcgcgacgagacgtttcccgtcaaggaggagatgctcgatgagatggcacgcgatgttgccgaagtcgatctcttcttgatgaacatcttccccttcggcgttgatttccttctcgagttcgagaagcgctacgacaagcctatggcgcttcttcatttcggcagcaacgacgcgatattcgtatcggcgcttacagctcgcggccacgaggcgtattgctggtacgattgggatttcgcgccccacaccctgaaggttctcagggcgcgcaaggtcttaaaggacacgcggatactgtgccttccccgcgcgaattcgaccgcttccataagcgcatgcgactcgtttcttgaccacaatgtcgtatcgaatcgcttgggcgtggggttccgttattacaacatgcacgaattcctcgaccaaacccagatagtggacccgtctaccaacccgactttgccgggccgcctgggagacaacatcaacgaggaagacgtcgaagagatcgactgcatcgtccaagggcttatcagggatgccgaaatatgcgacatggaaaaatctgccgtattcaattccgtcaaagcgcattatctcgcaaagaagctcatggcgaaattcgattgcaatgccttcaccgccccttgccccgacatgtgcgccacgcgtcgcctgaacgaagagcagttcacgttgtgcctcacgcattcactcaacaacgaatgcggtatctgctcggcgtgtgaatacgatgtgtctgcgctgatttcgatgattctgctgtcgaacctgtcgttcagcgctccttatatgggaaacacgtcgctcggaaagatggatgcgggcgatgttttgtccacgtcgccgcttttgaagaaggatgagggcggttttgcccgcaccgaaagcagtttgagctcgactggcggtatcggctacacgtttcacgctgttcccaatcgcaggcttcgggggtatgacggtgagcaatcggcttactccatacggcctttcgcgatggggggccgttggggcgcgactatacgatacgacttcaaccaggatatcgggcaggttgtaacgatgtgccgcttcgatcccacctgttcaaagattttcgttgcacgaggcgagatagtggcaggtgcaggatacgagacggaaaactgcacggagggattgtttttcaaggtttcggacggcaggaagttcttcgaggggtcgttgcttgtgggcaatcatatcccgctggtgtatggcgacgtatacgatgaggttgtgggttttgccaagttgaagggcctcgaggtcatcgggtgcgcgtagcggacgggcgcggctgacgtttttcggattttggcaggttgcctcggataggaggctgggtgcaagggcacctgatttcattcggcgagaagtattctatagggaaaggaaatgggagaatgatcgaaaaagcaaaggatatcacgctcaacgtgttgccgttggagcttttctgcgagcacctttactactacgaaggaccgtgccggttcggaagcggggatgccctgcgacccggatacgatgagattgcgttcgccgaaagggcgaagaaattcgttgccgacatcgaggcgcatgtgcccgagggcgttaacgtgatggaccccgtcttgtttcgcaggaccgacgactgggacgaaccagaagagcaatggcgagcgatggaggccgctgtcaacgcggctgacgtcgtgattcccatggcgggtgccggcgttcaggatctggcgttcaaattcgctcagcgcttcaagaaaaccatgtgctattgtccgtcatccggcgctttcaacgtgcccgatgttccgtctgcgatagcggcgcgagacgtcgactacgtatgctattcggagtaccgttgggaagatttcgtgttgcgcatggtggcgcttcgtgcgaaaaaggtcattgcccgcacgaaatacctttgcgtgacgaggttcgatggcacccagtccgtcagccggcccgactcctttacgagtctcgatcatattacgcagcggttcggtacgcgtttccattttgccaacatacacgagttcttcgactgcatgggagaagctgtgcccgagggcaaccatacgacgccggggcggaaaaccctcaacgttgacgaggacgacttgaaaagggcgaacgaaatctgcgacgagctgatcgacggagccgaaagcgtcggcatgagccgtgagctgatgtttccctccgttgtggcgtacgtgctcacacagaagtacatggatcgctttgactgcaacgccttttcgatcccctgtcccgacgcatgttcgacgagaaggctcaacgagggaaaattcaccatgtgtttgacccatgccctcaatgcggaagccggcattccgtcgtcatgcgaatacgacctgcccgccgcgctttccgagcaggcgttgattgccgtctcgggtatgagcccctacatgggaaacacatgccctattcccgtgctcgacgggcatttcaagcatgtgttcggcgcgaccgaagagcagcttgaggagcttgcgaaagatcccgagaacatcgacagactctggatgacccagcactccgttgcccaccgatgccaccccgacgcgaacgcgcatgcgccttacggcatcgctccgttcgcctacgatcagaaattcggcgcaacgctgcgctacgatttctctcgcgacaagggcgcgtgcattacgctgtgcaagttttcgcctgatggcggcaagatgttcatcgggaaagcggaaatcgtcgagagcagcggaaaagacagggagaactgtacgcagctggtgttttaccgtttcaaggattcgcttgccgcgcatcgcgcgcaatgcaaggtgggcatccatatagcgcttgtgtacggcgactacaccaaggagcttatggcgttggctgaggcgctcggcatcgaaccgcttgttgtcgagtaaggctgcaggcgagcgcaaccgttgagaaaggcatccgatgctgcaggagagcatacgcagggccgccgatgaatctcaggccgagatcgacctcatcctgagccaggagaggctcacctacccgtttttcagcgagcatcttcgcaggttcgtgctcattcgctacgctctcgatccttcggattgcgaggggacggatgacttggacaagctgacgctgatcagcttgtccaagaccctgaagatgtccaaagacctggttgctgattacgaggctgggcagaactgcgatggggcaacgtctgctacggtcaagcggtcgttgcttctcatgaaaatccaaaaggcgttttccatcgagttgtcgctgccggacctgatgggaatcgacactctcgaagatgtcgcgcgtgccgtctggaggcatcttccgatatcgagcaaaggtgcttgaggcgacccgtcttctccccttagacggcaaatgcgacgaagttatttttatatgagaggcgggcttattgttaaaaacatcgaaaagcgtatcgtaaatcgtcgaaatcgatgaaccaaccgaaaaggctgccaagagaccccatgctacacttgcgttgtggaaccgtctgcgtttaacaagtcgaacgggggagacttaaatgcgatacgaccatgcccaagtgctcgatgcgtcaatcagcttgaaattccagcaagaagaaacatccgcgcaggagaagcgccgggtgtttacgcttcatattccgatattgtgcctgatggggttctccctgtatctcggttggatattctgtttgttctggagtccctctttggcgtccgcttccctcgcaggcgattaccaggtgcatcttatgcgcatggtcatgaccatcgcgatgtttatcgcctatgtgatcttcggcctgttcgcacgcttctttgcatcgaagaggggggagatccttctcaaaacgctctctcttgcgttgagccctatggtctgctttgtgggctttttctctcccggcttcgatctggcggctgccttttcgttgtgggccgcgagtggaataggttcgtctgctttgcttttggtctggtcgaaaaaaatcgtcgagcttacgagaaagcaggtcatcttctccgtttcgagcgcgtttctcatagggtcgtttctctttatttcgacggcgttcatgcctagcggcatcgcataccttgcaatcggatcgctgccggtcatatcagtcgttttcgctgttttcgccatgtctcggtctttgacgatcaattcgactgcatccgatgacgtccagggatcggccgcgccgatgcgggagagcgcggctcgaattgctgcgaactcggcgggtaaagaagagtcgaagggggatcgcaaaatagctttcatgcgcacgatattgcttgcgttcgcctacagtgtgagcatcgggttcgtcggatcgtgcgcaacaaccgcaccgtattatccgggcggtttgtacgtgatagcggccggcaatgcattcgcggcggttttcaccgttttgtttctcgtcagaaaaccgaaagatatcgcaatcattttgatcgaggtgttcctgcccatcatgctcgtgtgcatttttctgttctcgtttgtggggtatgcgggacagcttgcctgtattttcatcatgctcgctttgcttgcctgtcatgatatcgtcgatatcgccgacgtatcgaagagctcgcttttgttcggcgaaaactacgtgaggacatttgccgtcggccgaacgctgaatggtttgggctgtacgcttggatggatcgtgggtatggtgctgagctttttcccgggtatcgatgcaagtggaagattgttcgtctgctttgcgctcgtggtgttcctcgtggtgattacgagcttcgccgtcttccatccgggaccgctttcgtacgtgcgctccgtgaagatggatgcggtgctcgaagctcgtcgtgctaacgccatcgaaggggatccgggcgcgctgctccacgcgaaggtcgaacgcatcgctcaggagtacgatttgacgagtcgccaagcggaggtgttgctctgtttggcccaagggcgcaatgccggatatattgcgcagaagttcaccatctccacccatacggcgaaaagccatatatacaatatatataataagttgaatattcattctcaacaagagctgctcgatatcgttgaggttgcgcgctgcgatgacctcgtgcgggaagcatccagcctgtctgcggatttacgcgcttaataccgagagtctgatcttgcgcccatcagtatctgagagccttggcctaccctgtacgcgttgataggcttgccgaggatcgttcggtatgggaggattcggtctttccagtgggggtaaaggggattccatggcaaacggaaaagtcaaacatcgttcgaagctcgacaccaaagccacgcttctgctgtgcgcgtgcgatagcaacgcactcgggtcggagatgacgccgattctggctgttatcgcgctggcattcccgggagagaacgtcaatcttctcgttgcgctgcctcctctgtgcatcatacctgcctcgcttattgcggcgaagctttcgtactatatcagccgtaagactattcttacggtggggcagatactgttcattatcggtggcatcggcggcgcgttcgcgccgaacttcgaattcttgcttgcgacacgtgtgtttttcgggcttggttgcggtttggtgtatcccatcgtgccaacgctgatatcgtacttcttcgcgggcaacgagcgggcaagcatgatgggcggggcgaacgcggttggcagcatcatcgcgatggtcttttcaaccctatcgggaacgcttgccgttatcggatggcatgttccgttctttatcaacatcttcttcgtgttcgtgcttatcatgcagatcatctttcttccgaaggttccgcccgagaaggacatgccgtttgccaaagaggcggcaaatcttgcgcccgaacagaagcgcattggccgtcgtgcctggatgggcatcctgctcatgttcgtgaccatgacgatcagcatggtgtatctgctgaagcttgcgattttcatgcaggagacggggatcggcgattcggtcatggcgggcctcgcctcgtcatcgaccacctgcgtcgctttgatcgtctctctcgtgtttatgcttatcttcagggcgctcaagcgctataccgtgctggtttccatggcttcgattgcccttgcgttcacgctgcttgcgacggctacatcgatgatcggggtgttcgccggggctatcgtgtacggcgtgtaccttggaaccatcattccatatcttcagacgacgttgagcgggttggttcacccctaccgccgaacgtttgccctttcggtgctgtctatggcgatgttcgcggggcaggcatgctcttcgatgtacgtacaagtggtcgagagcgcgatcggaacaagcacggcggccatgttcgaggtcatgtcggttacattcattgttttgttcgtcatcgtgctcgtttacctggtggcgacgaggaagaacgcggcgtttccgtacagcgatgtgacggagtagctgatgtgctgcccatgcaaccattgtgggaaatgcgcagatcggcaaggacgctgcatcgtgtgccacgagaagctcgcctatgtgttcgcgccgaagtgcgacgcatgcggtgctgtgcagccgccagcgccaggcaagcctacagaggtttcgctgggaaaggcaagtgcgtcctagggcgggcgcaacaaaggtaagcctgcattggacgggggtacgatatgggcgtaaagaaagctttgctgatagattacgagttctgcttggggtgttcggaatgcgagaccgcatgcatgcaggcgcacggatgcggacccgacatgatgggcatcaaggtaacgaagcttggaccgtggaagacccgcgacggagcctggcagtacgactttgtgcccattccaactgattggtgcgatctgtgcgctgaaagggtcaacaagggaaacaggcctgcatgtgtccgccactgccaatacggcgtgataacctacgggtctgttgacgaactcgtatcgttcgtgaagacgaagccgaagatgatgctgttcacgccgaagagtcccgacaacgtttagccccgaacgccatcgaccgatccgaacaggtgcttgtcgatgttggcgattggcgaggacccgtcttggggcgtggtcagcttttcgtagagcgaatcccatattacgtcgatgtggctgctgagaaacgcccgcagatccttctcgtcgagccgacccttttttctgaaccggtacaaatcgttgcagtggcggtacatgcccatgatgaccgatgcgcataaaacgaccatgtcgttgggctctattccccgattgagctgttcttgcttgagcaggttgcagtatatcgactcggttgcgagaatgttttcgagctcgaagcgcgcaaacatgccgtgctcgtcgcgtgccgaatggaggatgtagctgacgtcgaaaaggcagaacatcgccttgaagtcatacaccatggtttcgagtactttttctttggcgggcatgttggttggcaggttgctcgcgaaggatttgagcgagtagatgttctccttgctgaatttccgcaaaatcgattctttggtcgggaagtacttgtacagcgttcgtgtggatacgtccgcctcggctgctatgtcggtgagcgtcgtctgcttatatccctgctcacagaacagatcgatggcgacatcgtagagatgctgctcggtcatctgcttcttctcttcgcgatttgccatgcgcttcccctcgctgccgactttgcgtgattgctgtcgggttttagctgactgcgataccattatagctgttcggggctgtttgcggcttgtgctgccgttcgttttcatcgggttgggatactcccgcaggaagggggaggggttttccgcatgcggggcagcgagtgcttttctcggggatggggtttcggcatatggggcaggcgttctcgagctcctttatccactcccggcattttccgcatccgttgcagctgtagcatgcgcccataaaacctcctgtctgccgttttgcttttcacgataatgatacgtcatgaaaagtaagttcccgcagcgtcgcatcttgagctagcggttccaatctgctgatgaaatacccgttcattggacagatacaaaagattttcgagacaggattttcgaaacgaggtagggcatcgagatccgtttagagcgaaaaacttacttttttcttgctagacttcggttgttggaaggcagccggtgatttggaagggcgacgtggtttcgatggatctgcgaagagacgaggcacagcggtttccgggggacgttgtgttctcctggcgcttcgtcgaacagagattccataacgacaatcgtctttcatggtggctttcccatctgtcttcgccgcttgactgacgcggcattcttcgttttttctcaaggcgaatcatcattcatagcagtttgcgtgatgccgggcgcaaaggggcctaccccttcgcgcgcccgaacaagggttgatttccgtatatgaagcaagggggaaagcagcgtggcagacaacatgagcaccaccatcaaaaccatgggattctgcggaccgtgttcggcttcggagcctgccgaggttgacgttaaagacgggcgcatcgtccgcatcagaccgttcgattaccaggcgcgcggtgcgaacggcggcaaggagccgcttgagcgctggtccatcaaagcgcgcggacacgagttcaaggcggctgagaaatcggagatcacgccgtttgcgctcgcgacgaagcaccgcgtgtattcgccgaaccggattctgtatcccatgaagcgcgtggactgggatccgaatggcgatcgtaatccgcaaaaccggggaaagtcgaaatatgtgcgtataagctgggatgaggccactcagcttattgccgatgaagtcaggcgcgttcatcggcaatacggcgtgaattctattttcgttcaatcggacgggcatcaccaggttaaaacgctccatgggcctcgtggatgcgaaggcgccttgctcgacgtgttgggcggttactgcctgcaggcaagaaaccccgacagctgggagggctggtattggggtgcaaagcatatatggggatgcgatcctgttggcgagggagatcagcagaatctgttccttgacgtcgcgcgcaacgccgacacggttttattctggggctgcgacgttgttacgacgccgtgggggtggggcggtcacttcccaagccgatactgcttcttccttcgcgacataggcgttcggcagatatatatttgccctgacgtcaactatggtgctgctgtgcatgccgacaaatggataccggtgcttccgaataccgatgccgccctgcagctcgcgatcgcccatacgtggatcaaagaagaaacgtacgacaaggattacatcgagacccattcggtcgggttcgactggttcgaataccatgtcatgggcggcgatgacggcatcgagaaaacgcccgaatgggccgaaggggtatgcggcgtgcccgcccgcatcatcaaagccctcgctcggtcgtgggcgaagcaaaatgtgtcgatcgcccacagcaacggcggctcctatattcgttcaacttactcgcacgagcctgcgcgcatggaggttgccttgcttggcatgcaggggctcggcgctcctggacgcaaccagctcaagatgatggaataccagctgttcagcctgcctcagcagacgcccatcccccgatcgaagttcatccccaacctgtttgcggtgcttctgccctatgctgcggatacgcgcgactccctcgtccccgaaacgctcgttcccgaggcgctcgcaggcgattacacccatgagaacccgcttacctggtacggatgcacggtcgcgggtgtgccggttgaggaccagttccgaaagatgcagtacccggcggagggctccgagcgcattcatatggtatggatcgactcgcccaaatggacgtcttcgtggaacggcggctacaagttcatcgaggcgcttcattccgagttgatcgagtgcgtggtcgcccaacatatctggatggaggacgactgcctgcttgccgatatcatccttccagtcaacacgaagttcgaagagcgcgacatcaactgcgacatcatgtccggcaactacaacacgctggtgctcgaggagcggtcgatcgagcctctcggagagtcgaagagcgactgggagtgcgccgtcgccgtagccgaaaagctcggtgtcgtcgaggagcttaccgaagggaagagccttgaagacaagatgcgcatcggattcgagaattcgggcgttcaagactacatgtcgttcgaggattttctcgagaagaagagcttcatcgtgcctcccgcggaaggatgggaagacgatcccgctgggttctacggattctatgccgaccccaagcgtcatcccctgaccacgccgaccggacttatcgagtactactcgtctcgtttggctgagaggtttcccgacgacaaggagcgcatgccctatccccgttggatcgagaagggcgaaacccatcccgacgagcgcctgagcaccccgcgtgccgagaagtaccccttcctgctcgtatcgaaccatccgcattggcgcctgcattcgcagctcgacgattgcgcctggttccgcgagatcaagacatgcaaagtcgtgggcccggacggctacgcctacgagcccgtgtggatcaatccccgcgatgcggaggaactcggcgtcgaatcgggcgatgtcgtcaagatattcaacgaccgtggctggacgatgggcggcgtatacgtgaccgagcgcatccgtccccagaccgtgctgcaggatcacggcgcgcgcatggatcccatcgagctcggcgtatccgaccgcggcggtaccaacaacctgatcgcgccgaaggctatcgcgtcgaagaattgcgcgggcgaagttacgagcggatatctggtgggcatcgagaaggtggatgttttcgagttggcgaagcagtatccggaagcgttttcgcgtccctacgatcctgagacgggaccgctgcatatcgtcgacgcatggctcgagggtgacgaggaggtacgttaaatgaaggtgttcattgtcgatatagccaaatgcaacgggtgctatggatgccaggtggcgtgcaaggacgagcatgtgggcaacacgtgggagccttactcgcttccgcagcccaacaccggtcagttctggatgcgcgtcaaggagaaggaccacggacaggttcccaaggtaagcgtggagtacacgccatggctttgtatgcattgcgacgatccgaagtgcgaaaaagcggcgcccgatgcggtgtacaagcgcgaggacggtttggtcatcgtcgatcctgtgaaggcgaaaggtcgccgcgatctggtgggggcatgcccgtacggcgcgatcttctacaacgaggagctcgacgtggcgcagaagtgtaccgggtgcgcccacctggttgacgaaggcaagacaccccattgcgtcgatctgtgcgcgacgggtggcctgcgattcggtgacgaagaggatttcgccgacgagatcgcccgtgccgaaaccttcgtgcccgaagagggatgtagaccgcgcgtgtactatctgaaccttcctcacctgttcttggcgggtgacgtttgggatcctgccgacaacgagatcgtcgaaggtgccgcagtgacgctgaagacagcggacgggtcgactctcgaaacctcgaccgacgatttcggcgatttctacttccatcgtatcgatccggggatttacgacctgaagatcgaagcagggggattcaagccggtcgaaaggctcgggatcgagctgacggaaagcctcaacctcggagattttccgctcgaaagagcgtagcgtccgatcgccgtgccctgtgtggacatcaacgtgtggcacgccgttttacggcgatagatagcgggtttcacctgctggacgacggagtgccccgaacgagaagcgagacaagagataggaagcgagaggagacggaatgccaacattgcatttcaacgaacatgcatcgccagcgatagtcgagcttgaagacggtacgaaggtgtaccgcacatgttctgccggcatcggctgccacaacctgggctgcgggcttaaggtgttcgtaaaagacggaaagctcgtcaaagtagagggcgacgaggagaatccgatcagcaaagggcgcttgtgcgtccgctgcctgacagccaaagagtactactatcacaaagacaggatcctctatcccatgaaacgcgcccgcgaagaccgaggcaaaaatgcttgggagcgcatcagctgggatgaagccctcgatacgataatcgatcggtatcgcgaaaccgtcgagcgctacggtatcggcgcggtcagcgtatggtgcggaacggggcgcgaggcgagtcaggttcatttccagatggcgaatgacgtgttcggtaccgtgaacgccgtgcatcctaacagcggctggtcatgcatcgtcccgcgcatggctgcaatgctctggactatgggaagctcgtatatcgaagcggataactcgataggctttcccgaccgctacaacgatccccgctggaagtgcccgaactacatgctggtctgggggcgcgatcccttgcgttcgaaccccgatggtctgttcggtcattccatcatcgagatgatgaagctcggcatgaagcttatcgtggcagaccctcgcgtgaactggctggcgacccgtgccgaggtgcatcttcagcttcgccctggcaccgacggagcgttggcattgggtctgctcaacgtggtcatcgaagaggacttgtacgaccatgggttcgtcgattcctggtgctacggcttcgagcagcttgccgagcgtgtgcgcgaatacccggttgaaaaggttgccgaaatcaccgaagtcgatgccggcgatatcagggctgccgctcgatgcctcgcgcagagcccgtcgacgctttccatgggtttggcggtcgaccagaatcccaatacgctgcagatcggtcacgccctcctgtctctgttcgcgatcaccggtagcatggacgtaccgggaggctgcttcatgggtctgcctccgatttttgccggcatggccgaaaacgctccggctgccgagggggagggcgaactcgaaggccttgccctgtacggcaacattggcgtagagccgcttggccacgaccgatatccggcaatgagcgccatcgtcaatacgacgcatcccgatgccacgctcgacgtgctcgagaccaatgtgccgtacaaaatccattttgcctacatgttcggccacaacactatttcctgtatggtcccgcagccaaaacggtggcttgaggcgatgcgcaagattgacttcgtggccgtggcggatctgttcatgacgcctaccatcatgggcgttgccgatattgtgttgccggcggcgaccttcttcgaaaaggagggctacgtctccaacaacaacgcttcccagccagggcagatgggcgctatcgttcccattctcgaaccagagggggagtgtcgcgccgatctcgagatcatgctcgagttgcatcgccgcctttatccgaacagcacaaagccgagctgggcgtccccaaccgatttcatcaacggtcaactcggcaagatgcgcgatgtcgacgcaacctacgacgatttgcgcgaacatgttatcgctcaatacgagatcgagtacaagaagtacgagaagggtttgcttcgcgccgacggaagccctgggttcaacacgccgaccgggcgcatcgagctgtattcgacggtgctgcaaaacctcggcgatgacccgctgccttactacattgagccgaagttcagcgccgtatcgcgccctgacctggctgaggagtatcccttgaccgtcacgaccggcgcgaggcgcttcacgtcgtttcattccgagaaccgccagatcgaaacgctgcgcgagatacatccatggccgacgatggacatcaatcccgaaacggcgcagcgctacgacatcgccgaaggctcgtgggtttgggtggagaaccatctcggaaaggcgaagctgcgcgcgcatctgacgcccatcgtgaaagagaatgtggtgagctgcgatcatggctggtggcttcccgaagccgaccccgagaacctctttgacgtgtttcaggtgaacgtgaaccagctcattccccacgaggagaacgggcctttggggttcggtacccattacaagagcatgccctgcaagatctatcgggctgactagggaaaaggagcaacgatgactcagtacggtcttctgatagacaaccaatactgcacgggctgccattcatgcgaagtcgcgtgcaaaaacgaacgcgacctgccccacggtcagtgggggatcaaggttctcgagctcggtccgtggaagctcgaggatggaaagcattgggagtaccgctacgttcccgtgcctacttcatcatgcgatctgtgcgaagctcgcgtcgctgagggcaagcgccccagctgcgtgcaccactgccttgcaagcgtgatggagttcggaacgcttgaggagcttgcggcgaagatgtccgaaaagggtaagatggcctccatcttcattccataaagcgcgcttcggcctgttcgattcccctgttgcaatccgtcgtgcgcggcggtgcaaggcgtgcacgacggatgcggacggggcaggtcaaataaggctttcacagggtgcgtccactactttttccataggttcgctccctgttcaaaacttactttttgtcacccatactcacaggtatcggattgggtcgaagaggagcatcgactgcgtgcgcgccgactccggcgagttgtttttgcaaagatctctgagcttgaaaagtcgtttttgcaaagacctctagtgattgtcgacaaccaggcgatgttggtctgatagggggtgaggggaactactccgaacgacccaacgaaagtttagtatcttattacaaaaggaggaaagaaacatgtctgagaaaacaaagatttctgccgggcagatcggcgtctttgctgcattgatgtgcatgtatttcattgcgccgacgcacagtgcggtcaacgttgcttcgacagggcttatgagcacgtacggcgttgatgcgaacgccatttcgtacatggtttccatcacgaatttgcttgagattcctgctgcgtttgttatcggccttgtggctggccgcaagctaagctatcgcgtctgcgccctgctggcgacggcgctcgtgttcatcggcgggttgcccacgtttctcggcgcagcccttccctgggagggcattctcgtcacccgggcgatcctcgggctcggtctcggctgcttcatgcccgttgtgctcggcgttatcacgcttatgttccaaaaggaatccgtacgtgcgactatgatgagcgtcgcgtccgtcattttcaatatcggcatgatcgtgaccacgaacgtcgctggcattctcggagcgatttcgtggaacctcgcgtggggcatctatttgttctcgcttgttccgttcgtgctgtgcatctttctgctgacgcccaaaaacgttcccgctgttcccgagaccgacgaaaaaggcgaaaaagttaagatcaagctgcccgtatccggatggcttctgctcgttttgttccttggcggcatcatcatgagccagtcgctgttcaaccttggtggtgcaaccatcggtgcggttgtcgataatcctgccgtgatcggtaccattttctcgttgttctcggttggcgccatcgcatcggcgcttctgttcggtcctgcgtacaagttcctgggcgcgaccgtcatccccgtgttctggatcgtcggcatcgcaggctatgttctgtggtacgtcgcccatgttacgggtaacatcccgctgttctacgttgccatcatccttgccggcttcggcaccaacacgatgaccgtcggcgttccgatgcttctgtcgacgttcgtcgcccccgccatcgtcggcgcggttatgggcttcagctacgtattccagaacggcggcggcttcctcgccttgccgatcgaccagctggtttcgacagttgccggcgccgatgccatcatgagctcggtatggatcttcgatatcgtcatcggcgttatcgttctcgtcggcttgttctacgtggctaagaaagccaagaaaatgagcgctgacgaggctgccgagaccacggaggcgtaagcctgttcgtttgattcccttgcaagggcgactgtcgatggcagccgccctttttgcatgctcggcttcgcttgacgtttagcgttaggtttcgacgggcgaaggcgtgcgttcccactgatttcgaagtcttggcgttcggtgaattcctcttcggtgtatagggttcgggcgcgttcgggcagctgcaagaaatccttcagcgcggcgggttcagccccggtgcttatttgaagatgctgtcttatcaggtagttgccgagatcgaaatcgcacctgtaggtcgtctctgcaatgcggtaaaggacgctgtttcgtcgcagatggcgcttcccctgcggcgatcggaaccccggaatagaaaacggcgcatcggggcttttgccagccgatgcgccgtttggatgcgttcgggcgatgcctccctacggcaggaagatcaccgctttggagcctttctcgtcgagtttcttggagagctcctcaaccggtccccattcgatgacgttggcaaggcagtgcagcgcgcaagaggggatgcctccttgcgctacgcggtcttcgcacatgtcgcagtagctcgtggggaacggaaggtagttccactccagcttgccttcctccatttcgaagggtccgaactcgaccatcttgataccccatttgtccatggggaagtcgtgctcgtttttgcacgcgagttcgcagctttgacagccggtgcagtactgataatcgatcagcagtccgtttttactcatgatcgcctccttagccgagcacgcgctcttcgttcggggtcctgtacacctttaccggaacctgcttgtagggggctccgaatcccatcttgccgagtacgcggtgcggaatgaggctgttgacgtttgatttccagacgccgtacagattcggttcctcgccgtcttcctccggataccaccacccgtgcgctgcgccgacgacatctttgcggacgatgggcgtgactttggcgatctcgtgtgcactgccccatgggttctcaatcgtcacttcgtcgccggtcttgatgccgagcttctcggctgtttcgggatggatctcgaggtagggctcgggggtgagctggcgcaggctcgggatctgcctgtgctcggagtggaacgaggcgaagtaacgtgcgcccgtcgtgcacatgagcgggtattcctttgctagatcgggtcgtgcttcggcgccgagcttcggtgggaagtagtacggcagcggatcgtcgccaagcgactgatagccggtcgaccacagctcgacgcgtccggtggtcgtctggaatcccggctgtccgtcggcgcggatgagcccacgttcgtgtttgtgatatccgccgatgtcgttggtcgccacgactttctcggagagttcttcccaggtggtgtccatctttcctacgtcgtcggtgaggtactcttcgaccgatttgaaaggatactcttcgccataggctttctcgtagaaggcgttaccgaagtggatgagcatctcaagatccgacttgcactcgccgacctgcagacccttgttgatggcgcctgcgatacccatctggcagccttggttcgtcatgacgatgccgtcgtgttctgcccaagtagcaagcggcagcaccacgtcggcgagcgccatgacggtcggcgtcatgaacatctctttggctacggtgaactccatcttcatgagcgcatcgtgccaacgcttgggctgcgcggagcaggtgggggaaagcaggttcgtggaatcaagccatgccatcttgagctcgtaggggcgacccgtctcgagtgcttcgagcgtgatatcgggatgcgtggtgttcaggagcacctttacgatcgggtaggtgtcccagccgatgcacttgttcttgagttcgtcgctcatgaagtcggttgcgccggtcatctcgaactgcatctgcacgccgacgaccgttcccccgggcacgtcgagattgccggtgatggcagccatagcgatgaggcattgcgtgacctggcagccgttggggttctggtcgaccgcgacgcccatgagcaggctccagtggtgctgcccgtcgtatccgagcttgcgggcgcacacgcggatctcgtcggccgagataccgcaggtttcggcggcgaactcgggcgtgtactcctgcacgcgctcggcgagctcgtcgaagccgtagcaccatttgtcgatgaaatcatggtcgacgaggtcttcgttgatgaggacgttcaggatggcgaggcacaatgcgccgtcggtgccggggatgatctgcagcacctggtcggcgcgggttgcaagccagttcacgcgggggtcgaccatgatcagcttgctgcctcgcttcatgatctcgataagcgcgtgtccccacaggccgtcggggttggacttcaggggttctttacccaggcagaaaacgtagtcggggcgcgtccactccgggtcgtcccatacatcgagggagcctccgttgaaatcgagctcgatgtaggcgctgccgagcatcatggtcatggctgtctggcgcggtcccatacatgaccagccggactgggcatagcagttgtttggggttctcagcaccttggacgaaagcgtgaagccgtagcgcaccgcctctcgacccgtgcccatgtagacgcagatggcttcggatccgtagttggcgcgaatctcctcggtcttctcgacgatgagctcggtcgcctcgtcccagcttatgcgctcccatttgtcgagtcctcggtcttcgcgggcgcgcttcatgggatagagaatgcggtcggggtggtagaccgcctccttgagcgcgaggcaccgggggcacaagcgcccctgcgtaagctggtggtcggggtcgccttcgaccttgacgagctctccgtctttgacgaacagacggattccgcatccgacggcatggcatcccggcggcgaccacgcgcacgtgcggatgaccttcgtgccgtcgtcgagcacctgctctttcggtgcggggttgtctttgaaatgaaaagccatagtgcactcctttcctggcgcttgcgcgcccggctcttcgagccgaatgtcttgatatgaaaagagatatcgtctgattgcttggcaggaaaagactaaaggtaaacaagtaagtttcacaggctccgggcgcgaccgctatcggctcgcccaaagcccttatcgcaagaacgcacgccttaaaaacttactttttatcgcctatcttgtgggctgcgcacgaagaacggttccgatcgcaagtcgatgcggtcgatgcgtcgaattgcctgcgcaggtgcgtacggaggtatgcgcggcggttatttcagacggcgctgggagaagcaatctggttgcttggcagccgcaggatatgcggtgcgacgagatgcatggcatgcaaaggcgacgagaggagaaagcatggttaaacgcatcgaaatggaggtggaacagggaggtacgaacgaagtgcgccctgacttcttccgcgaaccgccggtcaaatacactggcggcgacctgccgtggcaatgggaggaagacggcatgatcgccacgcgcacgggcgcgtgggcggctccgggctgccacgacggctgcggggtcatcgtctacacggacaaggacacgggcaagttcatcaaggtcgaaggcgacgaggacagcccctactaccagggtcgcctgtgcgcccgctgcatagcgctcaaggaggcagtctatcatcccgaccgcgtgctgtaccccatgaagcgcgacccgaaggatcgcggcaaagccgacaagtgggagcgtatcggctgggacgaagcctatgcgatgatcaaggagaagttcgatacgataaaggcggaatccggcgcaaaatccgtcgtgttccatctgggcacgggtcgcggtacggcgccgtacatgacgcgtctgcagtacgcgttcggctcggtccagtacgcgtacatgctttcgggcaactcctgctatgttccgcgcgtagcggcatgcaacgtgctcatgggcacctactgcgttcccgactgctcccagaaccactacgaccgctacgagcacgagggctgggtgccgccgaagaatatcttcgtgtggggcaataacccgctcgtttcgaacgccgatggcaacctcggtcactgggtcgtcgattgcatgaagcgcggcagcaggctcgtggtcatcgacccgaagctgacatggcttgccgcaaaagctgatctgtggctgcaggtgcgctgcggcaccgatgcggcgcttgccctcgcgatgggcaagtacatcatcgaaaacgacctctatgatcacgagttcgtagaatcctggtgctacggattcgaagagtactacgaggcgacacgcgaatggacgctcgagcgcgcttccgaggtgacgtggattcccgaagagaagatcgcccgcgctgcgcagatgatggctgaaaagcccacatccgtgcagtggggcctcgcgctcgatatgacgatggagtgcctggccggatccgctgccgtcgtcgacctgtggtcgatcacggggcagatcgacataccgggaggcatggtaacggttcatcagcccttcaacatccagacttggaacccgcccgatccggccgaatgcttgaccatcgaagagcagaaaacccgcattggcggcgaggatttcccggcgctcaagtattcgggtgtggtgctcacgcaagctgatatgactatcgaccagatgctttcgaaccgaccgtacaagatccgtgcgaattggatccagtcgaccaacccgctttcctgcacggcgcaggagccgaatacgcgtatggagcaagcgtacaagaacgccgagttcaacgttatggtcgatccgttcatgactccgactgcgcaggcgtgctgcgatgtgttcctgcccgtatgcatgtatcccgagcgcaacggcatccgctcgatctactaccatgtgcaaacgacgaacaaagcctgtcaggcgcttggcgaaagcaaatcggacatggaaatctgctgggagctcggccgccagtggaacgacacgctctggcccggtgacacactcgaagagttcttcacgttcacgatgaaggagacgggcatgtcgttcgaagaagcccgttcggagaactggatctaccccgaataccattacgagaaattccgcactggagagcagcgtcccgacggcaacctcggcttcaacacgccgaccggtcgcatagagctgtattcgacgctgttcggtcagtggggtcaaaggccagtgcctcattacgccgagccgccttacagtcccaatcaggttcccgagcgcttcgacaaagacgcatacctcgagaagtatccgctcatcatgacgacgggcgcacgtcaatgggcgtcgttccactccgagcacagacagattccgcatctgcgtgcgctccatccgaatcccgagtttgagatcgcacccgaaaccgctgaaagctacggcgtcaagcagggcgattggtgctggatcgagaatcatctgggccgcgtgcagctcaaggcgaacgtccagcccattttggatccgtcgaccatttcgctcgaccacgcctggtggttccccgagcgcaatcccgaagacgaaggcgccgggtgctatgacacctatgtttcgaacgccaatgtcatcatcgaagcggggtgcggcgagagcgggttcggcaacaactgcaaatcccatatgtgccgcgtatacaagtgcgaaccggaagagatagtcggcgacaccgacatggacgagatcgtggcgcgtttcgcgatgaacgaggagctggtgtaaatggctgccgaaaaggcttacggactcctgatcaactacgagttttgcacggggtgccactcgtgcgaggtgtcgtgccagatggaacacgaccttccggttgatcgttggggcatcaagattcagaagatcggtccttggcatatcgggggcgacgattatcagtatgacttcgtgcccgtaccgaccgatcagtgcaacctgtgcgccgagcgcactgcgaaaggcaagaaaccgctgtgcgtgaagcattgtcagagcctggtcatgcagtacggacccgttgacgagctcgttgagaatttcgacggcaaaagcaagtacgcgatattcgtgcccaaagcgggaaccgctcagtagcgcagtgcgcttaacgctgtgagaagccgtgcaaaggcgtgccgcgcaagccgcctttgcacgggcgcctcacccgcattcggctgcgtcgcagatccgatggcgaggcagcctgcttacgcttgcacctccgaggaaggaaagtcatgacctgttatggtagaaccgccgttgtgaactacaggggtaccttgtcggacggcacggtgttcgacagcactgaaggaatcgagccgcttgaattcgtcgtcggatcgggaacgatcatccacgggttcgacgaagctgttgcgggaatgtcggtcggcgagcgccggacggtgacgatcccctcccgcgaagcgtacggggattatagcgaggagcgggtggagaaaagcccgatgtacgccatccccaacgccaaggacatcaaagtcggcaagctattctatttcatcactgacgagggcttgcggtttccggctaaggtgaccgagatcaacgagggcgttgcgacggtcgatttcaaccatccgcttgcgggcgaggatctgacgttcgagattgagcttgttgcagagaaggattagcccaccgaccgctcggctctccggctgttcgaaaggtcgagcccctacacgaaggctcgtgatcggttgaaatgctttctgaacagatcggtcagcttgtagtgattcgaagagatgctcttgtcgttggtccatgcgatggacgcgggggttttgacggcttcgttctcatgcgcaaactcgacgatagtcgctttttcccagtcgacgagggcctgtttgcctgaatcgatcagggtgaccgcctcgtcttcatacacaaaggcgagcgacgttgcgaatgatgcgctcacgggggctatgacggggtcgaacccatgttgcctgcagattgattcgatcatgtcctgcaggcgcgtctcccgatgggacagtatgatgcgctggtctttcaagtcgtcccagctaacgcttccgctttttgcgaggcggttggttttcgatgctacgaggtcaagtcggatctgctgtagagttatgctgcagcaggcggcgggtacctcgccaacgaatacgcccatatcgagttctttactgcagaccatatccctaacgcgctcgttggcgtcttctgctatatggagcgcgatccgaggatgacttcgctggaacgaaatcagcgattcgatagggaattgggcggccccgtttccgaggaacccttcgtaaaatccaattcgtatcggctttgcgtcatgttcgcttctgatatctgccgccgcgtttttgaatcgtgtgacgccggcaacggcttcgaaagcttttttctgcatgatttttccggcgggggtgagggcgacgcctttgcgatcgcgaacgaacagcgaaaaatcgagttctttttcaagcgatacgatggatttcgagagagcttgttccgatatgaacagctctcgtgcggcggctgaaaggtttttgtgctcgctcgccttgagaaagtactcgagttgccggatttccatgccagatacctcctgtcgcattcatcttctgcgaatgggcgacgatgagcaagcatggttctcggtatcgggcaaagataatacccagagtatgttgggagcggtttcgagctgcggccgatcggccgacttgagcgggttgctccaaatgcaggttggatcatacagccaatgggtgttggcgcgcttggttgccgacggggtatcatgggaacaggaaagccggatctcagacggattccggcatgaaggacgcgttcatcttcctgcagccaggtacgtttcagcctaccgaaaagggggattttgcgtcatgatcacgcaagctcaagacattctgcttaacgttcaacctgttttctttgaaatcaagcacctgtatcgatacgagggcccttgtcgcagcggagtcggcgatcagcttgagcctgaattcgatcttctgcgcaacgaggaatggtggaatacgtttaccaaagatatggaaactcgccttccgccatgcgtgaacgttatggagcctctgcgctttacccgaaccgataactgggatgacgatgagtcgatgtgggaggagatcggcagaactacggcagaagccgatttctacatcttccactccttcttgggtctcgatgggctcgttgtcgagttcgccgagcggttcggcaagccatgctgtgtcgagcccgaatacatcaatccatgttcggcgacttcgatcggcgctgctcttgcggctcacgacaaggcatacgagttctatgggttcagaaattgggccgacctctcgaagcagctcgaagtgcttcgtgcgcgcaaggtgataagaaacacgaagattctgctgcccgtgcgcttcagctcttcggtttccatgagctcggtcgatgcgtttcccgatcagacggcgataaccgaaaagctcggcattcgtttcaggccgatcaaccttcacgagcttctcgatcagatgtcgcctgctgtaccgggaggcaatccgaccactccggggcgcgacacctgggatatcaccgacgaagatatggcggaagccgaaaggctcaccgatgagctcatcgccgaggccgaagaagtcgatgtggatcgtaaatggatcatgaactcggttatcgcttatctgacggtcaggaagcagatgtgccgcctcgattgcaacgggttcacggctccgtgccctgactcctgctcgacgcggcgtcttcacgagcaagggtttacgttttgctttacgcattctcttttcatgcggcagggcattccctcctcgtgcgagttcgatacatgcacggttgcctctcagcaggctcttatcgccatgacggggatgaatccctatatgggcaatacgtttcccgtcgtcaaggaggacgggcagtgggtgacgccgcttggggtggaagaagaggatttacccaagctcgaagagaacgaaggttctctgtacgtcattcatcattcggtgccccacaaccgcatgaggcatccggaagagaacggtccgtacgcgctgcggcatttttcggaagacaagggcttcggggcggtgtttcgctataacttcaacgccgatgaaggccagcagatcacgttgtgccgcatagcgcccgatggcgagcggatgttcatcggtcgtggttggatcgtgtgcgacggcggttacaaccttcacaactgcaacggcgaagtggtgttcaaggttgaagaccaaaaggatttttacgagaagcagctgacattcggcaaccatctcgcgatggtgtacggcgattacgttgacgatatggcagcgcttgcgcattcgatgaatatggacgttgttatcgcttgaggatatcgggggcgcatcggtgttccgacgcgtccccgatcgggagaaaaccgtggaagaatcgtttagggatgctattgcccggtcaaatgaggatgcgcgtgcgtgccttgaggagatcgtacgggtttcggatgatcgaagcgccgttcatgcattgctgaagcgctatatcaaaagcaagtatcttctcgatgaaaccgagatggagtgcgaagatatcgctgctttgtcgaaggcgagcgtcgataagctccttgcgaaccaccgaaaggaagcgctgcaggatgtttcgtcggtgtgcacgggatcgtcgtcggcgtcaacgaagaaagtcttgcttgtcatgtccatacagaagggacttggaatcaagttcgatgctaagacgtcgggatccctgaaaacaatcggtgatttgacccgggaggtttgtttccgacttgccgcaaaatgacaacgtgttcagcggtcttggatgttttcgagtccgtagagatcgatgagcttgtaggatatgctcaacagcagacgaacgtcgggatcgtcgaaatccattccgagcagcctcttgatcttttcaaggcggtaaacgaagctgtttctctgaatcgaaagcgccttgctcgccatgttcgaattgcagtttgctttgagataggcatcgagggagcggtaaagctcgggttcggatcgagcaagcgaaacaagctctttggggcagaatctctcagggttcatttcgccgaggatgtagctcattcctatctcaagcgtattgtcttcgaacttcgcaatgcgcttgtcttgttcggagtagcttgttttcaacgcagcaagggcttgccggtagctgccgggcagccctttgattccggggaacaatgagcttgccccgatgacgaggccgtattctcgggcgagctcctcggcccgatcaaacagcgccttttcggtcattcccgaacgagtgcagtttataacgacggtgattcggctatcgagtacgaaagccagacaatcgaattcctcttgtatacgattgcataccgaagcgagcggcttcatgaggatgctatcctccacgcgcatgttcgaaacgaaatcgatgcacaagcacagaaactcgtcggtttcgcggctccaatcgaacgctatggcgcattggatgagcgtggagtcgggtacttgttttccctggatgaacgatctgatggttgctcgcacgtccatgtagcgttcgttgctgtcgagcacgccgtacgatgaatacagcttctttatggctgctgcgaacacgagcagaggggcgcaatcgtacggcccgatttcctggaaattcgaatgcacggacaggatgagcgaatacccctgcgaggctttgatggtggagcgcaggacggtgcaatgaaatgcatgcattacggcgaacgtgggctccatcgaagagaagtccatgcccccctgctcatcgatgacgccgtcgaacaccatgtttttgggaaggtactttccctcttcgatctggtcggtttgctctcggagcaactgtcttgtccgatatacccgatgcacgaggacgcgactgaactggtcggtgatgcagatatcgttcttgaagacaccgaggcttgcgttggcgagatcggaaaggcctcctcctccggttgcgatttcgtcgaggtttctctcccaggaattgaaccgttggaatatcttctgaacggcgttgaaaagccgcgttctgctttggctggaatctatccagatgatatcgcagttcggtatagtgccgatgtagctcggcggcgtgccgatgcagatgcacgaaaacgaaaggttcgggttgcggctcagatagcgttggatgcggtctttcgcgtcttcgaggtgcttgtcgatggtgacatagaggatgttgctgtaatagcgatactcgttgacgctgaacaaaacggggtattcgagattcggcttgtttggatccgagccgatgacctcgccaattacgatatcgtcaagctcatgggcgatggtgtgcagattgagtttcaagactacccccgagtgcctgcggattatttgtatcttgcattttaatatacagcggcactccgatcctgcgcgatcgcacgttttgccgcacagcgggcaaaaccgagaagaaggccgccgggttggcgccgacggccttcttcctaaagctgcgcggtgcgacacttaccccatcatgctctttgcggcatagcgtccgaaggttgcagcgcgtccgcagcttgcggcgccgagccagagcggatagtcgttgccgaagaagttgcccgacacgttgcccgccgcatacaagccttcgatcggctgctcttcgaggtcaagtacttggagcccttggttcacgtggaggccgccgaggatggtcagcacgccggggacgcgtttgatggcgtagaagggcgctttctcgatcttcgagatcttaaggtagtcggggttcttgccgaagtcctcgtcttcgcctttgtcgacgagggcgttgtagcgctcgaccgttttgaggaagtcgtctttcggcacgcccatcatgccggcgagctcctcgagggaatcggctttcatgatggctccgcgctcgagcgcatcgtcccattccgcttggttgtcgcccgaaacggtccagcgcatgaaatcgccgccgaaatcattccaatgctggttgtagtcggcgtcggttacctggaaccgggtgctttcgggttgcaggatgcattggttgacgatgtaggggtagtcggtgtcctcgttttggaagcgctgcccgagcttgttgacggcaagccaaggggttcccgaaaacggcgcgtcgccttcaggcaacgggctcggatcgaaatggatcatcggcgcgtgggccggcttgtcgatcgaggctcccgcccacatggccatcttgtgtccgccgccggtgttcgaggcggggaagtaggtgttgggaaggtcgacgcaaaacggtgcgaacgccttgaccatttcgggatcgttgccgtagtcgcctgtggcgagcagcacgccctttcctgcattgaacttgacgtaccctttgggatctccctttgtgcggttgccgatgacgccggtcacgcgatcgccttccttgacgagctgcacgccctcggtgttgtagtagacctgggcgccgccctcgacggctttgtcgaggatggcttcgagcatggcggtctgctggcccacccaggcatgagcgaagggcggctcgcccatcatgccctggaattcgacgatgccgtcggtttcggccatgagccagtcaacggtttctccgctgttgtccatgaatatcttgagcacgcgctcatcggctttgccgccgttgagcttagcgtagttcgcctgcacttcggccacgtcgtattcgacgccgatcgaggcttggtatttcgaattgaccgcaccggtgctccagccatggctgatgaacaccgattcgttttgcagaatggcgacgctcgcgcctgcctgcacggctgtgagcgctgcggtgatacccgccgtacccgctccgacgatgactacgtcggcatcgatcgtctcgacgatatcggcgtcggcgatgggctcgggtgcgttttcgaccgtccaggttttaaccagttcgccactcgcgtcggcgttgcctgtttgcggctgctggttcgcgtcggctccggcgctttcgccctgcgctcccggagcgcacccgccgagcaggcccaaagcggcgaagctcgctacgccgatgcccgtcccttgcaaaaagctgcggcgcgaaagagacgtacgctggttgttttccttgttttccatgatggtgctcctcccttgctttttgcggtcgagctgttcgaccgctgcatgggaagaccttacgatgatcgccggcgaagaactagtgtagcgaacgctggtcttgtttgtgcgatcctacaaaacaagagatcgaccaggcgatttatgacgtatctcccacgtgtgccgcacggtcacgcatcggcctgttcgctgctcagcaaatcgtacagtttgacgatgatgaagaagttcgcgcgcacggcttgctccgagaaatccgaatcgagcagttcggctattttgtccatgcggtagcgaagcgtgttcacgtggatgaacagaagcttcgatacgtcggtccatcgaaatgaatgatcgagcatgagcctgagcgtattcatgagcggggtgccgtgcgccgcttcgaagtcgatcacgggtttgagggtctgcttgcagtagcgtcgaagcgcttcgtggtcggtgtcgagcaggatggcgaagatgccgagctgcgcatagcggatgatgtcatcctccttgccgagcagccatccgagctcgagtgcttccttcgcctcccgcaggctcgtaccgagctgggggaacgggtagctgcggccgatgccgatcgaggtgacgatgccgttgtaacggtcgtggacggccttgtggtaggcgaggtcgtaaaagtgtcggtggggcatcttgcggccttcgtcatcgacggcgtagtcgctggggaagatgtggatgaacccctcgtcgatgccgatgtcgataacgtcggaggcgtgctgttcacgcaggtactgccgtaccgattcggaggtcgatgcccaatcgtagtgctggtctccgccgccgatccgcgtgattgtgatgaagaaggatccggtttcgtcgatttgcagctggcgggttgcaaggtagtcggccagcccttgcgcgccgttttcgaaaagcttggcggaggcatcgtccctcatggctctgatcatgcgctgcgacgagagatagcttgccagatggtaggtgagcggagcgctcacttcgtcgaggaccgaaacggtttgttcgactgcagcctcctttacgggtgcgagcacgatcgatgcgaatgcgcggccgagaggaatgaagtaggtaagccggttgttccgcgcatcgaagcgatagcgcttttcgcctggctcggattcggccgcttcggctggatttcccgtggggccggtcgcatcggctgcagcggggtagagcaactcacggtcgggaccgattacgagcgctttgcagcgacaggtttgctcgaggtatgctcctgcgtagccgaacccctcttctgcgagacgctccatgaactgaaacgacgaatcgcgcatttcgtgcggcatggttcctcccttgcggcatctatgggcggcatcgcgtaccgtccgcattcaagggtagcagaatctgccgcgtcgatgtcggtcggatgaaaaatgcaaccgagcgcttgattcgttaatagattatgtcctatagtggcatttcacaattatagtatacggtcttatgaaatcaagacgacagacgaggatcggtgagcgcatggaattggacaaaagggttgctgaaatagtggcaaaggcgtatgcgggggaagcggcgaccgaagaggagtgcgtctatctgctcgggttcggcgaggcttcgcccgaggcgtttgcggtgcgggcggcggctgcgagcatcgtgcgcgcccgcactgataacacagcggttatcttcggccagatcggagtggagtgctccccgtgtacggccgattgcgatttctgctcgtttgccgcaagcacgaccggcttcgaggcaatgcgtcttgacgacgagacgatcgtcgagaagatcgatggcttttgcaaggacggtgatctgtacggcctgtggcttatgaccatgcacgaatacgatctcgaatactacctccacgtgttgaagctggcccgcgaacacgcacctgctgagacgaacatctacaccaacgtgggcgatacgagctacgaggatttctgcaagatgaaagaggcgggagcatcgggcgtctaccatatctgccgcctcggcgaaggcgagcacacgaagctcgatcccgaagctcgcttccaaacgatggaaaacgcgcgcagggcgggtcttgcgatcctcgatgccgtcgagccgatcgggcccgagcacacgcccgagcagcttgttgaaaagatgttcctcaccaaacgtttccgctccatacagaccggctcgatgaagcgcattgcggttcccggcacgccgtttgccgacaagggcgagatcaaccacttcacgctctcccagatcgtatcggtgcagtgcctcgccttgctcgatatggaaacgctgccgtggatcggcatccacgagccctgcgaggcggggtatctttcgggtgcgaacctcatttcggcggaaacgggcgtgaaccctcgcgatacggcggaggatacttccgcaagccgcggcctcgacatggatgcgagccgccgcgtgctcttcgaggcgggcttcacccacctgtgcaaaggcgacggcacaaaggtgccgttgaccatggaatacatcgaaggttgcaatcgatagcgtacgatagggcataaacgatgccgcacccgagggtgtcgaaccaggaggaagcgagtatggcaaaagcaagattcatggtagtaagcgggtttctcggcgcaggcaaaaccacttcgatgatcgcgttttcccgctgcatcaacgaaaaacacggcaaatcggcgatcattgcaaacgatctcggtgccaaaaacctcgtcgatgccgactacacggcaacgaccgacctgtcgattaccgagatcacaggcgactgcatctgctatcagacggagaacctcgtcgacaagctcaaccgacttgccgacggcggagccgacgtcatcatgtccgatattcccggctgcggcatcggggctcttgatcatgtgtatctgaagatgaaagacgagtatccgggggaattcgatctcatgccgttcacctgcgtcgtcgatcccgagcgcttgcgcatgatcctgcccgagcgggcaaccatcaacctgcccgaagagatgcggttcttgcttgacgcgcagatggccgaggccgatctcatcgtgctgaacaagatcgatatgctctcggcagaggagcttgccgccgatgtcgatttcatcaagaccgcctatcccgacatcccggtgatgaccatgtctgcgaagacgaacgacggcgttgcggccgtggtcgattatctcatggcgcacgaggcggcggccgagcaccgcgaaatcggatacggcacccccgaattcttagcggctgaagagaagatgtgctggtacaaccgtcgtttcttcgctaagagaaccgacgaggccaatatcgacttcaacggcgtggtcgatgatttcatggaggccattcgcgacgggctcatcgaggcgaagcgcaacgttccccatctgaagctgttcgcggcgggcgagggcgatgatttcgtcaaggcgtcgctggtgggcgtcgattacgacatcgagtacgagcgcaagctcgagcacgaatacaccgcgatgtccatcgtcgtgaacgcgcgggcggtttgcgaatccgagacgatggccgccattgtggatgaagcgatcaaggcgatcgaggaaaagcacggtcttgcgtgccacgtgctgttcaccgaatgcttcggcatgatggatgaaggccgcggcaacgggggtcgcgcctctcgctgacccgctgcgtcggggttgcgctcgaatacgaaagggagctgacggcatgaatgaggctacaacggtgcacgatcaggtgcgcgagtattacgggcgcgtgctcggcgggtctgacgaccttaaaaccgacgcgtgctgctgcgcaaccgatgcgccgcccaagtacgtgctcgacgtcatggggcttgtcgccgacgagatcgtcgagcgcttttacggatgcgggtcgcccataccgcctgcgctcgaaggcgcaacggtgctcgaccttggttgcggcaccgggcgcgatgtgtacgtcatatccaaactcgtcggcgaaaacgggcgcgtgatcggcgtcgatatgacgcccgagcagcttgaagtcgccgagcgctatcgcgaagaacaggcgaagcgattcgggttttcctcatcgaacgtcgaactcaagtgcggttacatcgaggatctcgcctcgctcggcatcgccgacgaaagcgtcgatgtggtcgtgtcgaactgcgtcatcaacctctcgccgttcaaggatctcgtgttttccgagatataccgggtactcaaacccggcggcgagctgttcttctccgatgtgttctccgaccgacgcatccccgaagcgctgcgcgacgatccggtgcttcgcggggaatgcctgggtggggcgctgtaccttgaggactttcgccgcatgatggcgtcgcacgggtgggagcgctacgcgttcacggtcgtcgacgacatccatgtaggtgatttcgcgctcgagaccaagctcgggttcatcgggttcacatcgcgtacggtgcgggcgatcaaagcgacgggccttgaggacggcgaagaggacttcgggcagagcgcgatctacaccggcgcgatacccgagacgccgcgctacttcgatttcgacgaagatacacggttcatcaagggaaagccgcgggcgatcagcggaaacacggcccgcatgctcgagcagtcccgctacggcgccgcgttcgagataacgcgggcgggcaagcaccgcggtaggttcgatgcgctgcgcgcgcaggaagcgcttgaggtacggaagggtgcgaagaaggtcgatcttgcgctgctcgaacgcgcatgcgaacgatgcggcataaccccgttcgacgagcgggttggcgagccatcgctgctgcgcgcccgcgaggcgccctcgactatgcaggtgaacatctgctatgcatgcaacctcgcttgcaggcattgctacctcgagtgcggccccgcgcgcaccgagagcatgtcgcgcgcgaccatggaggcgtgcctgagcgcgttttcggcaggcgggttcaaggtactcgacatcaccggcggatctcccgagtacaaccccgatttcgagtggtttctgcgcgagggggcgaaactcggcagcaccatcgtgcgcacgaacgcgacgcttttgtgcaagcccgagtacgagcacctcatggatgcgttcgccgaaacgcgctcgcgcgtggtgatatcgcttccgttctacaacggtgacggcaccgacgcccaacgcggtcgcggcgcgttcgaaaaggcagtgcgcacgatcaggcgcctgaacgagctgggctacgagcgcacaggagagttgccgctcgacatcgtctacaacgtggcggggccgttcctgccgcccccgcaggagcttgtggaggaagcgtacaaggaagtgctttcccgcgagcagggcatcgagttcgacggcttgctcgcgttcaacaactacgcgctcggccgctttgccgccgacctcatggaagcgggcatgttcgacgaatacctcggtcttttggctgataacttcaacgccctcgccgtgacgcgcatgatgtgcctcgaccaggtgaacgtcgatgtggatggcacgctctacgattgcgagtgcaatcacgtactggggcttccccttctgctcgatgggcgtgcggcaaccgtcgccgatctggcgtgcggcgcattcggcgcacgccagatcaggacgaaccccatctgttacagctgcgcagcgggttcgggttcgagctgcggcggcagtttggtgtagcgcgcacggtcttttcgcgcctgtctcggcggcccgcatggcgatgcgggccgcttttggattcgcatcccttgcatggcggctcgctttacggtttcgagccatttcggcatgcattgccatccccgattccagaatggaatagccgatccttccgtcacctgcggctcgcttttcatgtgtcgatcccttccgtcgtatcggcagccgaaatcggttcggctgattagctttcctttttggaatagcccatgtcttttgtgatacgccacccgatcgccgtcgcccatacaatgctcgcaacggcaatggcgaggtttcgggatcgcggcaaacggcagtgctgccgtctatgcgatgtcgtgcggcggtggggtgtcgcgccggttgaagatgcatccggattccacaatgcgaacggtattgagctatgggggtggtttggtgtctgcgcttattcaagaaaccgatcggcagaaatctgccgcatcgcctatcgacgggctttccctgcctagggaaagcgacggggcggcggctgcaacgggtcatttgcagccgaaaggatcgtttcccctcaaacgcgttatcggagcggtgcttgccgcgctcatcgtcgtctcctcttgccttgttcccggtaccgagagcctttctcgcgagggcgtcatggcgatcggcgtgttgctggcttcggttgccatgtggttttgcggcacgatgccgcagggcgtcgtcgggctcgtcggcattgttttgctggtttttctcggcgtcgttccttcgttgaccgaagccctatcggggttcacatccgccactacctggttcatcctctgcgtgttctgcatgactgccatcatgcagaagagcacgttgggcctcaggcttacgcgtgcgctgatcggatgggcgggcgcgaactcccgcaagctcgtgttcgccttcatgctgggaacggcggtcgcctcgtttttcatgaccgatacgggggcggtcgtgcttggcatgagcatggcgcttcccttgctgaaggcggtcgatgcgaagcccggctcttcgaatctgggcaagtgcctcatgctgggcgttgcgttcgccggcgttctcggcgggttcgccttgccgtgcggccattcgctcaacatcctcggcatcggcatcatggagtcgaccgtaggggagacggtgagctttcttggatggatgctcgtcggcattcccatcttcgccgtgatgctgcccgttacctggtggcttctgacgcgggttttccctcccgaaagcatcgccgacaagaagggcgtcatcgaggcgaacaccgcttcgtgcggcgcatggaccgcaaaggacaggaaatccatctgcgttgtcgttttgctgcccatcctgtggattgccggcaactggatcggcgcgctgaataccacgatcgtcgcgatggtgggtgtggcgctgctgttcttgccgggcatggacctcatgtcgtggcgcgagtttcaggatattgcaggttggaacgtgtttttgttcttcggaaccgtcatgtgcctgggcaacgccgtgtcgtccacgggcggtaccgatttcattgcaaccctgttcttgaacagcggtgttttggaaatacatccgttcctcgtgctgcttatcgtgggatacgtgatgtacatcatccatacgttctgcccggttgcgccggcgctctgcctgctgttcttgccgcccttgctgctgtgggcgcaaacggttggcgtgcccactgtcataccggtattcgtcgtggcgtcgattacggcgggcagcttcctcgtgccgctgaatccaaccatcgtgatcacctacgatcagggctattacaagttcggtgaagtcgccaaaggcggttggctttcggcggccatcttcgtgttcgtaacggtgtgctggtcgtttctcgtctgcgacgttatggggcttgtccaggcgatcccgctgtagcgggcgcaaccgaaaggaaaaaggtatggatcagcaaattatcacgtatgcgatcggtctggccgtggtggtcgttttgggcgcgagctacctgcgcttcaagcggcacgaaggggaaggcgaagccgaatcctcgacgagcatcaagcagaccatggccgaggctcgggaatacttcggcatatcgccaaaagacgaggacgatcgtctggctcgaacgctcgatctgacgcccatgaagatgctttcgggtgtgtttgcacctccgcgtaaaaagaaatcgttgcaggatgagaagaaggaaaaggagtgattgggaaaggaattcgtcaaggcatctgttcactgagattggaaggggaattatgagtaaagaagcggctgtgccagcgggtacagcaaagaagggcctgaccaagcgcctcgttggttttgtgctcggaatcgtcgttttggttgcggcgatgatgatcccgggaaacgaagaactctcccacgaggccatcatgtcgctgggcatcctgctgttcgccgtggtgttttggattttcgatacgctgccggtgggcgtgaccggtcttctgggtgccattttgctcgtggtgctcggcgttgtgcctgatttcgcgacggcgtggagcgggtttaccgcctcgaccgtgtggttcatcttcggcgtgttcgtgatgacagccattatgatcaagacgacgcttggccgccgcttggtgcgcgggctcgtgtcgaaggcgggcaccaagtcgaagtctgttgttttggcatacatgatcgctacggccatcgtgtccatgttcatgaccgataccggcgcggttgccgtgggcatggcgcttgcgctgccgttcctcaacgcgatcaacgcaaaggaaaagaagaagaatctcgggcgctgcttggcgataggcattgcgtttgcggccatcatcggcggcttcatcacgccgttcggccactcgctcaacatcctgtgcgctggattgcttacctccgcgtatggcgtcaccatcggattcttcgagtgggtcatccccggcctcatcatcgccgtcatcatgattcccgttttgtgggtaatcctgtgcaaggtgttcccgcccgaggatctttcgcccgaagaagcggcgcttgtcgccgacaaggacgatgcgcccatgaccgctctggataagaagtcgctcgtttacatgatcgtgctcatcgcgggcttcgttgcaggcaactgggttcccgtcctttcgaacgtgaacgtcatcatgatcatgctggccgttgcgtttgttcccggcatcgacatcctcaactggaaagaattccaggatgcggagggctggggcgttgtcctcatggtcggcggcgtcatgtgcatggcgaacgccgcagcttcgacgggtgctgcggcctatatggtcaacctgtttttgaacagcggaatcatgggcatcaacacgctgcttgcgctcattatcatcatggcggtcgcctacctggtccatacggtcgttcccgcggcgccggcgctttgcgccctgttcgtacctccggtcatgggcttctgcgttgcatcgggcatttctccggctattttcgccatgctgatggcatcggttacggcgggcagcttcttgcttcctctgagtccgcccatgatggtttcgtacagcgagggctattacacgacctcggagcttacgaaagcgggctggctgagttcggtggtgtacgtgctcgtcgaggttttggtgctgtatttcatcggcggcatgctgctgcccatcgttgcggcgtaagcgcagccgagcttccatattgtgttcttcgagagctgcagcccgattaggcgtcgggttgcagcttcttcggttaccatgcgctatgaaaggatggttcccatgcttgcgttcgtacatgcgaatttgatcgatggcaccgggagggatccccggccgtgttctaccgttttgatccaaggcgggtcgataatcgccgcaggagccgacgtcgatgttcccgttggatccgttgtcgtcgatttgcgagggaagacgttgctgcccggattcatcgatgcccatctgcatctcggcggatcggactcccttgatgaccgcatgggcaaccacggtcggcattttacttgggactattcgtacaacatagcccgattgatggcttggggcgtaacggcggttcgctccgggggcgattggacgcccgagatccttgagtttcgcgatgaggtggaggcgggcgccgtgcgcgctcctcatatcgtcgccccgggtcgtttcgtccaggcgtacgaagggcatccgctgagcaccgtgtacatgaacgaccccgccatcatgcagaatgcctgcgtgctcatccacgagggggatggagcggaccgcatcggggcttcggtgcgacgagccgtaagcgagggggtcgatatggtgaaggtgttttgcggggacgacgacaagctgcgctatcccgacgatacgaccgtgccctctttgactgacgagcagctccgccttgtggttcgcttcgcccatgaagctggcaagcgcgtcatgtgccacattgacgacctgtgcgacatgggcagagcagtcgatgccggggtcgataccgtcgagcacgtctgcaacgtgtgtacggatccggatcaggagatcggcgaggagcttctcaccaaactggtcgagcacggggtttgcgtgacgccgaccatcgtagctaccgcagagcacgaggagcacggtttcgcaaacggggcgcctcccgttgcccccgcggcgcgcagagccgtatccaagatgatccaggcgggcgttcgcatcggggtgggaaccgatgcgggcatcccgttcgttgcatacggcgaatcgctgcaccgcgaaatgcgggagctcgtggggtgcggcatgacgccgctgcaggctgtttctgcgtgcacgggcgggaatgcgaagattctgcagcgggatgcgctttacggtacggtggaagccgggaagctcgccgacttggtcgttctcggcagcgatcctttagatgacattgaaaacacgcgcgatatcgcccttgtcatgcgtgcgggaagggtggtcgtcgacaacggaattttgagcgaatgacggaatcggtataatgggcgggtgcgcacaaccgaaatacgggcagcatgcatggtttgggggccggtgtgaacatagatcatttgcgggaattcatctaccttgccgaaacgctgagcttcagcgcgacggcgaagcgattttacgtgagccaatcggtgctcagcaagcacgttgcatccatggaagaggaactcggcgccaagctgttcgtgcgcgatagccaccatgtccgtctcaccaagagcggcgaggcctttttggaagaggcgtgtactatcgtgggcagctacgagcgcgctctggcgcgtataacggccatcaaccaatcgtacgaatcggtggtgcgggtcgggtatctgcgcaatgcggcgcgaccgttcctcgccctgttcctgaagtggatgaataaagaaaaacccgagatcagggtttctctttcctgtatggagtacggggagctctactccgctttggccatgcgcaaggttgaccttgcgctggcgatcgatttggataccgatatgaaatcgcggtgcgattcgttcttcatctacgacgattgcttcgatgcgatcgtaagctacgaccatccgctggcagcgtttaaggacgaggggatcgaagccgcccagctcgaggggcaacagctgctgcttcccgacccttcggcgtatcccggtttgagcaatttcgtcgaggggctgttgcctccgagcggttcttcccccgcgcgccagtattacagcgatgtggacacgatgtacctcgatgtggaaatgggcaagtgcgtggcgttctcctctgagcacaacattcccgtgttcggcgacaaagcgtgctttttgcgcatcaacgacaggccgtcgtgctacagcgtgaacgccttgtggctcaaggagacgagcgaggatatcgttgcgccgtgcttggaagcgctcgagtactgccgcaatcgactggcaacccaaaaggacgcctgaccacctttttgaccccgtcttctatcacatgggcttaaggccgaaccagctcgcgtgcgttgtccttccagggggttgtcggcggcgctgcctcgttgcggcaaaaacgccccgacccgcctttcgggcgggtcggggtatgcatgcgggttgtcttgcgcgcaaggcgcgagcggttattgccctggagctttgggtgcgccgggggctccaggcggtttcggggcgccgggcatgccgggggcgccgggagctttgggcgcgccgggggcgctgggggcacccggggttccgggtgcgctcgctgcgggcagttgagccccgcactgcgggcacgttgcatcgaactggccgcacgtggctccgcattcggggcatttcttatccgattcgattgctgctggtctgaaacacatgatgatcttcctatctcttgtcggtgctttccgctttcaaagaggtggcgcgccctgggggagcgggtaggaacgttccgcattgggagcacgcaagggcccgggcatcgttttcgtagccgcaaagcgggcaggtgccaggcgcaagcgggggcgcaacttcacccgtgcacttgccgcatccgatgcatgtttgacacataccgtatccttctcttcaacgagtcgcggcgccgccgctcttcgggcggcggcgccgatatttaggcttccaggcagtacaggacctgcttgggtttcgaagcgagatccttcgcgaggtcttccacctcgccgaatttgagcacgtgcgcttgacagtgcttcacgcacgtcggctcggttccgccttcggccatccgtttggcgcacaggtcgcacaggtcggtgaacacgggcatgttgatgtcggtccaggcatcttcgccgatctggtagattccctcttcgtggatcttcaccccgcagtggccttcggggaaatcggcgtgcgtggtttcgacggcgcacgccatctcgcacgtgtggcacccagagcaccattcgtaatcgatcagaattccctttggcatcgtttattcaccaactttcgcataggagccgagcggatttgcgagggtgttgtgatcgccctgttcgcatttgtacacacggcacagtaccgtcttgtagttcgagccgaagccggaacggccgggatcgtaggcgagcagctgattgatgttgtagtcgtacatgccgctgaagccgccgtcttcccatccggcctgttcgggcatccaccagccatgatcggtcgagcagtagcgcggatcgagggcctcggtcaattgcacgcgtcgctttgcacggccgcgatggttttccacccatacccagtcgccctctgcgatgccgtactgctcggcggccttggggtgcatctgcaaaacggggtcgggccgcagggcgcgcaggcgcggcacctggcgatgctcggaatggaagagcgaccaggtacgggctcccgtggtgaggataagggggtactccttgtacatctcgggatcggctacggggccgggggagggttcgtcgaagctcggcacgcattcgatgccgatctggttgaagtaggacgaccacagctctatgcgcccggttgccgtctggaagcccggttgcccatcggcgcgcaagagccctttctcgtatttcttgtattcgaagtcgaggtaggtcggggccgcttcgcgcagctcctcgaacgtcatatccatgccttcgaggatgtgggagaacatttcctcctcggtgtcccacgggtagaactcggggcagatgcgcttgccgatttcgaggttgatcaccatgtcggacttcgcttcgcccacctgtatagccttgttgatggtctctccgcgctgcacgccgtcgccgatgcggatgccgttgcgctccgcgaacgtgcatgcgggcagaaagacgtcggcgagcgcctgcaccgtcggggtcatgtacaggtcgaccgaaacgatgaattcgagcttcttgagcgcgttgtaggtgcggcgcgtgtcgggcgaggagttgatgagcgggttggtggtttgcagccagccggctttcagcgggtaatcgttgcccagctcgtctttgccggtttcgaggcattcgatcgtcacgtcggtcgaggcgttcttgaagccgtagcggtacagcgggtacttgtggatgccgagtcgcttttccttctgctcgtcggagaggttttcgccgccccagccagcatagtagggaaggatcgacggcggtgcgatcatgccgccgggcacatcgacgttgccggtgatctggaagatggccgaaagcgcctggcatgcgggaaccgcttccctgctcatgtcgacggaaacgccccattgcatgatcatgccgtcggcgttcgcgatcatgcgggcggcctcgacgatcttatcgggggtcacccagcagatttcagcggtcttttcggcggtgtagggttcgcatgcctctttgagctgatcgaagccgtagcaccagcagtcgacgaactctttgtcgtagatctcctcttcgatcatgacgtgcaggatgcccatggcgagcgcggcgtcggtaccggggcgcaggggcagaaagatctcggccttggtgccgagccacgtcatcttcgggtcgaccgagatgattttcgaaccgcgcttcatgcagtcgacgacccagtggccgtacaggccgtcggagttggacacgatggggttgtttccccagaggatgatgcattcgggcgttttccagcgcgggtcatcgtagcgcttcgtgaactgctgggagtaatctcccacccaaaacgaacccgaggtgcacatggaagaagcgatgcgcggcacgaagcaggcgcagcctgaaagggcgaatacgacgttggggcttccgaaagaccaggcgaggtggctgatccatggagcgatgtcgcggccggttcctttgaagaacagcaccgattgcgcgccgaactcttccttgtacgccaagaacttctcggcgatcaggtcgtacgcctcatcccaggtgatgcgttgccaagcatctttgccgcgatccttcggatcgcgcttcatggggtagacgacgcggttttcgttgtaggcggattccatcagatcgaggcagcgcacgcaaaggcgcccctcgttgaacgggttgtccgggtcgccttcgactttgacgagcttgccgtccttatcggtgtacatgagcaggccgcagccaaggtggcagccagggcccgaccatgcgcttccgcgcgttaccgtgtattcgccctcctggtagcgccaaggcttatcgtgctcgacgtactcgtacttgtcggggcggccgattttctcccccgtgtgtctctcgtgggagacgtccttgagatcagccaactctctctcctttctcgtcctgtcttgcttaagcgagcgcggcgtcttcgctgcgtctgcgaggatgcgaccgtgcgtcgcgccccgtaagcgccgaagggcgcggcagcagtcgagctcttgctgttaagtgtaggaaggaaacgggtcaactcgcgtttcgttaaatgaaaggagtattccaaaaaggaaagtgattattcacggggccgccgatccgaaagaacgcctcgaaccgacggggcatgtaaaggatttgaccgctcgcggcagtgtgctgcagaaatctgcgttggggagcgccgcttttccggctagaccgcccagcgtttcagcgtagccaggtgcatgcgcagtatagccctcgcctcatcctcggagtacgacgagccgttctgggcgttgaactcgtcgagaaagcaaaggttcgtctcgatcatctcttctatggttttgtcggcatcggtaaaagagccgttttgatagcagtgcgagcagtattcgacgttcgtgcttccgtcggcctcggtagccaagtcctctgtggcaagaagcgtcatcgaacagctttggcaaaccgcgggctcgtcacctccaagaaggctgttgatcgatacgcggaatttctccgagatgagcttgagcgtttccgggttcggtgtggttttccctgtctcccaccgagagacggcttggcgcgttacgaacagcttttcggccatttcgtcttgcgtgagtccgttttcggctctcaggttggcaagaatctctttcgtttccatgatcggagcgctcctctgctcgggtggtttcggttcgcgtgtttgcatggaacgagtatacggtgattcgagagcgaaggatagcaacggggtgttgctttgcggcatatagtgctgccatcatattgtttcccacgcggcttggtgcgccacccttttattggatgggcggggctgggtggagccgtcgttgtctgctctttttggttgaggcattcgagtttactgtgcaaggagtgcgatacgcgatttgccacaggctgtccctgcttacgtgtttgcgccgtccgatacttcgacgagttttatccagtatgcgatgtccttgcctgcaagcgggtggttgaagtcgagtgtggcgacttggttttctatgctgacgaccttcaccgggatgggttcgatgttgcgcggggaggtccatccgattgtctcgccgacgggaaggttgtcgccgttcggtatcttgtaggtggggaccttctgcacggcgctttcgttgtattcgccgtatgcctcgctgcagggcagctcgagcgtgcgctcttctcctggctccatttcggagagagttgcttcgagggcgcgcatgacttggtgccttccgattacgatctcatggggtattcctaggcaatcgtcgaatacggtgccgtcggggaggcttcctttgtaaaggaaacggatgcgttgtccttcgcgaaccatggtggctgtctcctttctgaaatcgggtcggggtttctccgacccgatgcgtctgctttccgcatgattccatgctgcgtttcgcagcgaacgccgctgcgttagtgccagcgctgggaagtcaggaagaacccctcgacgggctttatctcgctgtcgtcgtcgatgagcgcggcggcgttctcttgggcgtttccgcaaatttcgctcacaggcgccttcgtctcttcggtttccttggcttcttcggcggtctttttctcgttgtcgaccatggctcgtcctcctctgatctgaaatggcaagcggtctgcagcggatctgcttgagggcgtcattcgagcggcgatcctgcggcagacggcttcattcgtttgatggtaaacgcattcggaaagcatgcctatcgtatgcgaagtatgagattgcgaagcgatatcggcattctcagtcgatatcgcgccggctttcaagcccttaagctgaacgggcaggcaggcgaaagggggagtggtgagaaaggaagccgaaagcgaacgtgggaaagcggggcaccagagcccctttgtcgtgggtgtcgtgctgctcgtcgctggcgtggcggtcgctgtaatccagtacaaggtaccgacgattctcaccgatcttatgtcgatgttttccatgagccccgaagtcgcttcgtggctcatgtcgatatttacgctgatgagcattttcgtggctctcccctcgggcgtgctcgcacagcgcttcggggcgaaatccatgatgatcgtcgccctgggcattgccgttgccgggtctctcatcgggttttcggcgggcacgagcgccgtgctcatcgcgtcgcgcgccgttgagggggtcgcgctgaccgttctgacgacatgcggacctatcgtggtgcaaacgtgcgttcggcgggacagggtcggtacggcgatgggtatttggggtatctgggggtgtcttggctcgacgatcgctgccgttatgacgccgacggtgttcgagtctttcgggcttggcggcacatggattctgttcgccggcttcgctgctttcgcggcggtgcttgtagcggtgttcgtgcgcatgcctcgcatccaggctttcggtcgtgaggactcgggtcggtccgttgcgccttttcgcaaggatgcagccctttccgacgcgcagcgcgccgaggcgccccccggcgcttcgaagccccgctatcgcgagctgtttacgcgcgacatagcgctgctcttcgcgggcctcgcctcgttcaacatatgccttctcgccatccttgctttcgtgcccacgattctccagatgcaggggttcgatcccacggtgtcgggttttatcagtacggctccgatgctcctttcggtggtgtcctcgccgctgctcggggcggtttccgataggctggggcgtagcaagccgctgcttgtggcgtccatgctcgtcatgggtccttgcacttttgctctttacgttgataccggtgtgctcatgtggtgcgcggtcgcgctcatggggtttgttggcatgggcagcgtgggcctgtttctttcggcgtatgcaaagatattgcctcgacctgagttggcttcgatcggcatgggggtgcttgtgcttgtgcagggcgtcggtcagtttctcggcacgtttcttgtacaggcgctcctcggcccctctttgaccgaatggacatttgcaggaggggttctcatggttttgggatttgctggttcgtttgctctgttcctgtgccggatacgctagacgtcctgcgaccttccgatgcgtggcgagcatgccgttgcccacctcgtaaacgcggttcgatatattcggcgacggatgttttcatacttcacgtatgatggtttttcctgagctgggatagtacggttgcagcaatgcccttgcaattcggggttcatctgcgagctcgtatgcacggtcgggttgatggggacagacgaggttgacggcgtggcggcgggtcggttctttcattggattccgatttgggtcttcgccgaatcaggcatatgcgacggttgctttcagccgacaagcaactgtcgtccgtacatgaagggggtcatgtatgagggtatcctctctcgacgatgagtttaccgaaattcaagaaagccagatcggcgcaacggagaaagactttgaagcggtgctgctcgatgggtgcttgggctttggactctcgataggcaacgccgttctcattttgcttatggcaatcggtcatagctccgatgcgggggcaggcagcttgatcgccgtctgcacggcgttggttgcggcgataacgttgcgggttggtcaattcctcaccgatcggcttcaaaccattgcggggaaaaatgtaatcgtctacggccaggcggccagctttaccggagcgcttctgcttatctgtttcggcattgatgttgcagcagctgcccttgcgggcgtgggtcttgtggcaacggcgtttctctatggtaggttcctggcaggcctcgcgcgcaaggcccttgcacttgtgttcgacgtcgtgttcatgtatgcgggcatcatgcttcttgtgctttcccagctcgctttctggttctcgttcgcagcggttgccgtggcggttgtcttgtcggttacgatctctctgctctactcccgcaaacgctatcagctcgatgatttggtgagtgctcgggaatcgaagcgccgcagtataaaggtgaaagggaacaaccatacgctgctgctgctcggctttatgttcagcgcggcgctcatggtcttcttcgtgggctttgctgtcgaaatcgctatgctcgcaatcggcgcggcggttggacttgcgggaatactatcgctgctgctcggtcaaatggacgagcgcatgtacaaggagacgatgaagaagagcgtcgcgtttacgggtgcgcttttccttcttccggtacctcttttgcccgatattggcaagcttgccgttctgtcagtttacgtatgcgttatcagtctcaacattattgtgctggtcaatgctgtagtggagacgtctcgtttcgacatgatctcgccgatctggcttttcggtcaagagggatcggtatttttcaccggcatctttttgggtggcgcgctgttcagcgtgggcagccttcattttggggacgtgcagggcgcatggtatgcaacttgcatcgtcgcggttgttgttgcggcgtggatgcagattcgcgttaactatcagatatacccgttcgaacccgtcatcgaaacgaagctcgatgaagaaacgcgggcgaatatcgagcatgacggccagagaaaaacactatggcagcagaagcgccagcttgcctgtgagcgatatggtttatctccaagagaacgagagatactgcagatactgctcaaaggcagggatgccaagtacatcatggacaccttctacatatcgcagtcgacggccaagacccatatatacaatatataccgtaaattcggaatccactcgaggcaggaactgctcgatttcatcgagggcatggagcttcccgaaggcttcggctgcaacgaagagggagatgcggcggattcagattaaagatgttttcgtcctcgtacgcgaaggatgaggaagcgaaaaagcatctcatcctatcttcgaagtagtttttcctcatttgcgaccaattcccgatgtgtccttcgccgcggaataatcgttttgcgcttcggattgtgcggttcgatgcgcgaaacctcgttatgcggggtcataacgcgaggggaagcatagcgatcattcgttaaggaggactcttatggcagtaaaaaccaagagtacggcttctagctatgggtgggtcattctagccgttacgtttcttgcaggcttcaccgcgccggccaatatggcgaaagttaccgcgctcgcgccggtcgtcatggcgacgttcgggttcggtcccgacacgctcggctgggtcatcgcgctgttctacgtgctcggtttcattatggcgtttccaacagcgggacttatcaaccgactgggcatccgcaacgtcgttctgattgcaatcggctgcgctgcagtcgggtctgttatcggtgccatgacgaccgacgtgaccgtttttatgatcagccgtttctttgaaggtgcgggtatgggcgttatgggggtggcgggcgcttccgcgattgctccgtggttcgctcctgaaaaacgcgggtttccgcttggcatttgggcgatgtgggttgctcttgccatgtgcatctgtccgatcctgtacggctgggtggtcgacgcgcttgctatgccgtggcagacggtatggtggggaacgtttgtgttcgacatcattgtgggggttatcttcgtcgtcttctaccgcgagcctgaacggccgtttgtatccgacgaggaaaaggcagcgggagctggcaaggcaagcttcaaaagagcactgaagaatccgatgctgtgggcgctcggcttgattttcttcttcgatgaggcggcgtttatggcgatcaacggcttcctgactacgtatttgaccgaagagctttcaactacgcttgttttcgcgacggggatcgcctcagccttcggtgttgcgggtgcaatttgcgcccctctatgcggaaagatttccgactggttgaaaactcgtaaatgggttttgctgttcgctctcgtcggtggtacggcgtataccgctgttgtgttcacaacccaggatccgaatctgtactggggaatcatgatcctcgctggtatagcgggaggattcgttccctcgatcatctgggcggcgactcccgatacggtggagcccgacgatgttcccgtggcgaatggtctggtggccaccactcagaacctcggtatgttcgtgggtgccatattcatgggcaacgctattgcagccttcggctggtcgacggcttcgtttgccgtcctcgttccttgttatgtaatctgcatcgtgatcttcttcattggactgcgcaagctgcgctaaacgtgctgagatgctttcgggttcgaaaggcggctcttcggggccgccttttcttttccggttgtccgccttcatggaaaaccgagcaaatcaatgagcccataagtaactgaacaggtaaaacgctctcgtaaatacgttattcgaacacgaagtatgaggttctcgactgccgatttgttgatttcgctatttgcgtacgatacccagtcgtctctttgcggactagattgccatcaaggttatgcttcccggttattgcacggcaacgcaagctccgcaaagagctatgcggggcaaccgcacagcccatcgcacaggtgcgtccgcagcgcgggcttagccgggcggtgcgaaaacaacgttttgaaaggagctgatgcaaacgatcgccgggtcgttgccttcggggacaaacggctgctgccctgagtgccgtttcgttcgcagcgtgttcgtgctgcggcccctgggctttcgaccgaacagagcgccgcttgtttcaatatgacggcgtgcaggctttgtcgctgcagaagggccttggcccgtgcggcgggaaagaagcagagaagacgagcagggaggagagcttatgaagatattcaaagggcaaggaaccgccgaccttggtaagccgtggcgattcgaagaggacgggcttacggtgacccgtggatgcgcgtggtcgcctccagggtgtcatccaacaggatgcggcattaaaacgtacgtcaacgattcgggcgaactggtgaaaatcgagggcgacgaaaaccatcccatcacaaacgggcggctgtgcgtacgctgtctaaccatacgcgactacgtgtacaatcccgaccgcatccgttatcccatgaagcgtgcccgcgaggatcgcggcaaaaacaagtgggaacgcatcacttgggacgaggcgtatgacctaatcgccgagaaggtaaagtattacaaggagacctacggagccgaatcgatactgcttatgggcggaacgggccgggagggcggtccgatgcttcccgcgtacgcccatgcatgtatcggcacgccgaacgcttgctatacgcagtcgggatattcatgctacattccgcgtgtcgccggaaccacctacgtgctcggcgccacgtatcctgagatggactacgcaggcggtctgcacgggcgctatgacgatccggcgttcgagctgcctgaactcatcgtgttctggggtaaagagccgcttccgtctaatggcgatggtttgttcgggcatgcggccatcgatatgatgcgccgcggagcgaagcttatgagcatcgatccgcgtgttaattgggtgtcgacgcgtgccgattggcacctgcgtttgcgcccaggtaccgataccgctcttggcatggcgatgctaaacgtgatcatctccgaagatctctacgaccatgatttcgtttcgaagtggtgctacggattcgaacagcttgccgagcgtgtgcaggatatgccagtcgagaaagctgccgagatatgcgatctcgatcctgacctcattcgcgaggcggcgcgtgtgtacgcgaaggcaaagcctgcgcagatagcgtggggccttgctatcgaccagaagtcaaacggcgtgcaagcgggccattgcgtactcgcgctcgaagcgataaccggtaacatcgatatccctggcgggcagcttatcggcgatgtgaacgacggcctcgagcttggtttcggatggaacaacctaggtcctgagctgcagagtaaaatcatgggcatcaaggagtatccggcgtatgtggggcttgtgctcaacgcccagtgcgacatggtgctcgacgcccttgagacgggcgagccctacgcgttcaagatgggcgggttcgaggatacgaatttcttggcgggcacatgtgcggcgcagccgaagcgttggcacgatgcaatggtcgagaacctcgaatggtgttttggcattgacgtgtggatgactccgacgattcaagcgtgttgcgaggtctttctgccgctttcttctaccgtggagcacgatacggtggtttacacgcactacggcgcttccccgatcatggcgggcgcagtgaacaaatcgattacggtaggcgactgtaagggcgattgcgagatcatgtacgaactcggcaagcgctgcatgcccgttaattttgaaaagtacgccgattactatgacttcttggctgattaccgtttggggtacaagcagacgttcgaagagcttcgcgaagaggtcgtgcatcagaagattgaaacgttgtcgtatcggaaatacgagacggggaatctccgtcccgacggtcagcccggcttcaacactccgacgggacgcgtcgagctgtattcgacaatgtttcgccagttcggcgaagacccattgccgtattacgaggaaccgcagctgagtcctgtttcgacgcctgatcttgccgagcggttcccgcttgtgcttacgaccggcgcgcgtacctattgctacttccattcggagggaaagcagattccgtatctgcgcgagatgaatcccgatccgctgattgagatcaatccatccgacgccttgaagtacggggttactgacgggcaatgggtcgaagtcgaaaatccctttggcaaggtcgttcttaaggcgaaggtgtctcagattgtaaagccgggcgtcgttcatgcccagcatgggttctggtttccggaaaaagatgccgaagagccgagcttgtatgaagtgtggcgctcgaacatcaacgagcttgtaccgcataaatacatcggcaagctcgggttcggttctccgttcaagtgccttctgtgcagcgtgaagccggtaagcgagagctatgacaccgacatgatggaagtttgggatcgattcggaaagttggtggtttaaatgacggcgtatggcttgctcatcgactacgagtactgcacaggctgccaatcctgcgaagtagcgtgcaaagaagagcatggaatacccgttggacaatggggcatccatctgcttgacgacggcccgtgggaatgctcggacggcaagttcaattggaacaaaattcctacgccaacccgtttgtgcgatctgtgcgccgagcgcacggcgaaagggaaacaaccgagctgcgtacaccactgccttgcgggcgtcatgcagtacggaacggtcgagagccttgcgaaggagctcgacgagaagccgaaccaggtgttgttcgtgcctaagccgtatcaatactgaacggtttgattgagcgacgtttgggccgaggtcgacgcaagccgacctcggcaggtgagccgaaggaggcgcgatgagcgaattcgaaacaacgggagccgcccgcattggggctgccgaagaccgcttcgaaaactatgcgatgctttcacgtttgttccgatccgaactcgatgcctccttactgagggtccttgtcgaaagcccggttatcgagccgatggaaaacgcccatttcaacgagggataccaacttatcagggggtttctcgacggagtcgacgacgtcgatcggaatagatcagtgcttgccatcgattactgtcttgcttttctgggctatggatcgaatccagagcgcgatgacgagagcaccggcatgcttgcggcgtatccgtacgagtcggtatacgtttcggggagcaagacgcttgccgggggcgcttcggcgagcgttgccgccgagtaccgctgctcgggctttatgccgatgcgcgaaagaatcgtcgctgacgaccatatcgcctgcgagctcgagtacctgcagcacctcgttggcaaagagctttcagcccttgaggcgaaagaggaagctacggtactcgatctgcgtaaacgcgagctcgagttcatcgaatcgcatccgcttgcgtggatcggggccttcgaatcggcggtcatgagctttgccgagaccgatttctatccgggactcgttcgcatgacgcgcggttggttggaaatggaagtgcaggagctcggcggagcagcgaaggcaggaggagacgatgagcgggcttggacctgacgggcgcggctgggacccgaaagccgtcgagtacgatctcggcgaagcggggcccggcaagagcatcgtgatcgagattacccgatcggtcatggtgcgcgtgctcgacgatgagaattatcgtcgctacaaggcaggggaggagccgatggcatttcagggacgtctgcacgcctcgccgtatcggttccccctgccaaaagaagatcgctggcacgtggtcatcgaaccgaatacctattcgggtattgcggagttcagggttcgcgtgctcgatgatgcggccatttccgggcaagcgcgctttgtgcgctgattcggatgcggtcgctggtaggtaaaacgaaaatgcaatacgagaaggagcgataacatgcgagaagaggattacaaggctgctgccgttgtaaaactggattcgctttcagatgtcaacgacatcggtaagccatggcgctacgaggacgagggactcaccgttacccgcacttgcccctggtcgcctccggggtgccatcctgtgggatgcggtcttaagctctacgtcaacgacgaaggtcggttggtgaaggttgaaggcgacgagaaccacccggttacgcaggggtgcctgtgtccccggtgcatcgcgctgaaagattacgtgtacaatcctgcacgcatcatccatcccatgaagcgcgcccgagaagatcgtggcaaagcggataagtgggaagagatatcgtgggaagaggcgttcgacatcgtcaaggagaactacgagcgcatcacttcgcagtacggctacgagagcgtcgtgggcttttccggcacgggccgtgaaggcggcacgatgagcctgtatcccacgatggtgttcgggacgccgaactactgctacacccagtcgggatacgcgtgctacacgccgcgcctggctgccgtagcctatattaccggttgcacgtaccccgagtgggattatgcgggcgcgcttcctggccgttgggatgacgagcgctatgtgcaaaccgaggtcattatgctctggggcaaggctccgctcgagagcaaccccgacggcttctttgggcatgcggtcatcgacgcgatgcgccgtggcacccgtatcatcaacatcgatccgcgcgtgaactggctttccacgcgcgctgacatccatctgcaactgcgtgccggcaccgacacggcgctcggtatggctatgctcaacatcatcatatccgaagatctctatgatcacgacttcgtcgagtattggtgctacggcttcgacgaactcgctgagcgcgtaaaggagatgccgcccgagaaggctgccgagatctgcgagcttcctatcgagaagatctatgcggcggcgcgcatgtacgctaacgccaagcccgctgcaatcatgtgggggctcgccgtcgaccagaagacggacggcatgcaaaacggtcagtgcatcatcgcgctgcaagcgattaccggcaaccttgaccgtccgggtggacagctccttcccggtgccgatgccgggcacaatgagctcgggttcggctatgcggaaagcatcggtgacgagcttatgagtaagatgatcgggctggatcagtaccctgcatactgcaacatgatccttaacgcgcaggcggatctcatgctcgaaacgctcgaaacagacgagccctatccgatccgcatgggtttctacatgggcaacaaccttatgacctgtacctcgatggagcccaaacggtggcatgacgccatcgtcaagtcgctcgagttctgcatcggcatcgacacgttcatgaacgcttcgatcgagtcgagctgcgacctgttcctgcctattgcgaccgtcgccgagcgcgagggaacggtgttcacgcactatgcgccgtgcactgtaactgcgggattcatgcataaggcagtcgattgcggcgggctgccttccgatatggagcttgcttacgagctcggcaagcacttgcatcccgagcgcttcgagaagtgggcgaatgctcacgagctcgtcgagcacttccgtctcggcgttcaggagcatggcgagtacttcgataaggtgtcgcaatgcgtggtcgctcaggttccgattgattactacaagtacgaaaaagggctcttgcgcgccgatgggcagcctgggttcgcgactccgactggtcgcgtcgagctgtggtcgacggcgttccatcagttcggtgacgatccgctgccatactacattgagcccgagttcggcccggtcaactcgcccgaccttatggaggagtaccccttcatcctcaccacgggcgcacgcacgacggcgttcttccactccgagcatcgccagattgcctacctgcgcgaactcaatcccgatccgatctgcgagatcaatccggcgactgcgaggagcctcggcgtcgcggacgggcaatgggtgcgtctctggaaccagttcggcgagtgcctcatgaaggcgaaggtatccgaaatcgtcgacgagaagaccattcatgcgcagcatgcatggtggttccccgaggaggatggaagcgagcccaacctctacggaaacttccgctcgaacattaacaacctccttcccaacggccatatgggcaagctcggcttcggcgctcccaacaagtgtctgatctgcgcttgcgagcctatcgtcgagagctatgacaccgatatgaacctgatctgggaaaaattcggaaagctggtgtagacatgacaacgtacggacttctgatcgattacgagtactgcacgaactgcggatcgtgcgtggtctcctgcaaggaggagcacgattatccggttggcaaaagcggcatcacgcttttggccgacgggccttggaagatggacgataacgacaactggaactggaatacgtttccgatgccgaccgacttgtgcgatctatgcgcggagcgcacgggcaagggcaaggagcccatatgcgctcaccattgcttgtcgggcatcatctattacggcacagtcgaggagctctcgaagaagcttgaggataaaccgaagcagctcttgattgttccccagtacaaaccgcgtgaggctcgcggcgagtttgtgcataaggaaaacaaaaccgacgggcatcatgcggcccatgtcgaggttgacggtaccggtgaagcggcattcggcgcacatcgtcatgatgcgaaagtgggcgagtttgaggttgaagaagacctctagatagtaaaggcgtgcccgccatgcacgtggttgtgcgtggcgggcgtctgcaggttgtgccggacggctgtgcggggtccgtatcgatcaggcgggtaagcgtcgtcgattgagttcgctttgccgttctcgctttgggcttggaaggcactgcatagggaaagcggggttgtatggataacgaacggcttggaaagatagcttatatacggtatcgcggaggcgcgcagggagaacccgaattgatcgacgatcgctcaaaaggagagccccttgccgtggtcatcggcgatcatcgcataccgaagggtatcgaggatgcgcttttcgatatgaagataggcgaaaagcggaatctggtgattcccagcgagctcggttacggcgtgtatgacgataaggccgcgcagtggtatctcaggacggctctcgaggacgggtattctcttgagcggggatcgattctcgtatggacaaaccccgagaaccagtctcagcgtccggctcgcgttaccgatgtgacgaaggatggcgtgaagatagacatgaaccatccgtttgctgggaagacgctcgagtattgggtcgaactcgttgatcttgtctgagggatgcagcgatgtgctacccctgtacccaatgcggtcgctgcggaaagttcaacgaggatagccccctgtacacgccgccgcccgatatcccctgcctgaagtgcggcggcgtcgtcgacggaaagaccggcgtgtgcgcagattgcgggcatgtggcgttcgagtctgcgggcaagggaggcgatgattctcgagaagacgaatgatcggacgtgcggtcggccaacctgattgcttcgcagcgtctcttgtctccctcgattaatcatctccgagactgggccgtttgtctctctacgactaaacagcgatggttttttaccctcgaattgatacaatcgtgcacggcatcggctatgcaatgcgattcagggacagccgactcccggagctgatgctgcatggcgaactttcgtcgatcgttcgcattggggcttgacgtaaagggggactatgtctggcaacgaaaaggctgctgcgcctgatggggctgtgggcgccggcttcaaaaatctcaatctcgaaagcattggaattgcactggcgataacgtggttcggtgcgctcctgtggagtccgagcgcggctcccacgtactttctcgagaacggcatggatttgcaggttcatgtgctcaggttgcttttcctgcttgctctttgcgcggtatatctcgtcgtccagttctttccctatatcgttcataaaagaacgctcaaaatcgttgcagtgtctatcggcacagccgtatccccactgccgatgctcggaaatgttgttcctgccttcgccgagttttgcaacgcgtttcccgtgttgtattacgcgttttgggcgggagctggcttttcgactgccgttatgatgttgatctggggatacgatatgtcaacgaaatcgaattcccagcagggcgttgtgaacatagctgcaagctgtattttttcgggagcaatgtatgtgctgtttgcttttatgcaacgcccagcggcagcggttctcattatggtgcttcctttggcgatgcttacggtatgggtaatgtgcttgggttggaaagacggattggccgtcgaggagcccgagcaggtcaagaatcctacggctctaaccaatatgcgtaaagtgttgggcaagggttcgactgtgtttatcttttcttacgggttcattatgggcgtggcgggttcgatcggtacgcagttttccatcatgcaatactcctacatattcgttggcgtgtcgtcgattacggcaggagtcggtatgtatgcgctgttgaagtcggggcgccttcgggttggaagaagcatgttcatgggttttcttccttttgccgtgctctgcttgtttctgttctcgatcgtgaacgatggcgggaagatagcgcttcttttcgtgatcttctttgttgttaacagctataacgtaatgaataccgcctatgccgattccggaaaaggcgaccacgaattcaacaggacgtatgatctgttcagctgcgaatcgcgtaccgctgatatggtgggaagcgctctcgggtggcttgttggttcggtggtgcagttcgtcatcgatcctcgattgggtccatactgtttttttctgattgccgttcttttggtcagcatcagcatcctgtcgttctttcgtaccgaaaccgagttgctccaggatgcggagccgggaaagaactacgatgcgtttaggtcggtcatgggggaatgggaagaggtgtgcgatcgcctctccgaacgatatggcctttcggcgcgtgagagcgagatattcctgctgctgtcccgcgggcgtgatcggcagtacattcatgcggttctctacattgctcccagcacggtgcggacgcatacatataatctttaccaaaaaatgggcattcacagccaacaacagctcatcgacatcgtcgaggcggaattcctcaagaagtaaaagaagtcgcattgatatgcggtttcgaagatttcctgcaagttgacgggcaaggatcttctctggggttggccgaccttggcggtctccagaaaaacggatgacgcggaatcccattcccatgctttcgttctcttgggttttgatgcgattggctgttgcgcatctgttcgtgaaaagggttccttcagcttggaagcgacttttcgctgcatagagcgcttcaaacggccaaaaacattcgtgttgcgcaactcatgccggcttcgaatgctggggtgcgaagaccgatgagtttgttggctcgctcctcgttgcccttcgtgctcttcgcgatgttggtggtgggcgagagcttggaattgataccgaagccttgggcgccgagggatgcatgcgaacagattgcggataatccaatggctcatcttggggttttcgctgcgagagcccgggtcttttttcaaggaacaaaatctcccattgggtaaaccgccttttgctcagcgcagttacgccgactccgtagtgcggctctgattacctgttcatacataacacgtctttaaccaggcgtaatgatgtcttttttgaattctaatactaaatgtcgatgccttttcagccgttttcgtacctcgttgcccttatgtgcatgcgtcgatctgccgacaatcaccgtgtacttgaaaaacaagacggggatttaaggaggttatatgccacgagtatccggatacatggcagacgagatcaccatgcagtacgtcacgactggaggagacgtgctcatatcgggcgatgctgagatgtctacggcgttgcttgaaaacggagcattctatttcgacgatgtgccgcctgggtcgtatgtcgtatcgatcgtcaacgtcgaagggtacaaccccattaacaagcttctcgacgttgaagaaggcgagggagatgtcgacctcggctggtttgccggaaaagcgattcccaaatccatgtggggcgttcacaacgactacgaagaggaagcgtaggcgcgccggaagccgccgactgaaaggtgcactatgggtaacgaagaaatcaagacatattacaaggggcttggcttctgtgggggaggggttaactcgaacacatgcgaagtggacgttagggatggaaggattgtccgcacccgcccgtttcgctacgacaagcactacacgcctgagcagatgaatgcatggacgatacatgcgaaaggaacggaatacaaggcctccatgaaaagccttatcccgccgttttcgctcgtgtacaagaagcgtgcatattccactaatcgtatcctgtatccgctcaaacgcatcgattgggatcccaatggcgagcgtaacccccaaaaccgcggcaagtcgaaattcgagcgcatttcatgggacgaagcactcgatatcctcgtatccgaaatccgcagaatccataaactgtacggtccgtactccatctattgccaaatcgacggacacggcgagaccaaaacggttcatgccgcccacggatgccaaaccaacctgctcgatctgttcggcgggtacacctaccaaggtcgccagcccgatagctgggaggggtggcactggggtgccaagcatgtttggggtcaggcgccgctcggtcaagccgaccagtacaacctatggatggacgtggctcaaaacactgagatgcttctcctgtgggggtgcgacatggaaacgactacgtggtcgtgggaggggcagcagtcgagcaagctgtgctactggttcaccgatctcggtatcaagcaggtgtatgtatgccctgatgtgaactatggagcagccgtgcacgccgacaagtggattcccgtaaagcccaacaccgacgccgctttgcagcttgctgtcatatatacctggcttgatgaggggctgtgggatagggagtacgttgaaacccacgcctacggctacgacatcttcttcgattacgtgctcggaaaggaagacggtgtgccgaagacccccaagtgggctgaggggaaatgcggcgttccctcccgtcagatcaaggcgctggcacgtgcttggcataagaaccgtacggctatcggccacggcaacggtgggtcctatatccggtcgatttattcgcacgaacccgcccgactcgaagtgcttgcgatgtgtatgcaggccattggcaagccgggtcgcaacgtcatgaagtttatcgaatggcagatgatgggtcagaagagcgccatgcccggacctcgcagcgagctcattccgtatcctggcggagcttacaagggatggcttatgggtttcaagaagtcgttcattcccaaaaccatgtttcccgaggcggtaacgggtgggtggaccgctgagaacccgctgacgtggtattcgttccccgatgcgagttttccggctgaccagcagttctatcagtaccagtaccccttgcccggagctgagcccatccatatgatctggtccgatgcgccatgttggacgacgtgctggaacggtggcaatgcggctatcgaggcgtaccgtcatccgagcatcgagttcatctgcaccgagcatatctggttcgaaaatgattgccagtttgccgatttgctcttgcccgtgaacaccaagttcgaagaagaggatatcaactgcgatacgtcgagcggcgatttcaactacattgtctacgagggtcgctgcatcgatcccatcggtgaatccaaaagcgattacgagatcgcctgcgaagtcgcaaagcggtttggccccatcatctacgagcagttcacccatggggaatcgatcgaggactccatcagggccggcttcgagacgtctggatgccaggaatatctcgattacgatgagtttagggagaaggagtacttcatcattcccacggccaaggattgggaggacgatcctcgcggccatgcgccttttgcggaagaccctcaagcccatccaatgcagacgaaaaacgggcttatcaacttttattccgaagagctggctgcgcatttccctgatgacaaagaacgaccgccttaccctcagtgggttgaagccggcatcaatcatccgtccgagcgccttggcactccgcgcgcggaacgatacccgtacctcatcgtgtcgaaccaccctcgctggcgctgccatgcccagctcgatgacatcacgtggctgcgcgagatagaaacctgcaaggtcgaaggccccgacggctacctttacgaaccggtttggctcaaccccgtcgacgccgagcgcgagggcgtgcggaccggtgacgtggtgaagatattcaatgagcgcggctgggtgctcggcggcgtctacgtgaccgagcgcatcatgcctggctcggtgttgcaagatcatggagcgcgcgtcgatgcaattgtggcggggaaaagcgatcgtggcggtgccaacaacctcatcgccccgaccgcgacgacgtcgaagaacgccgtcggagaagtgacgagcggttttctcgtcggtatcgagaaggtcgatgtattcaagttggccgaggagcaccccgaagaattcggacgccaacgcgacgatggcggcgtgctgatcgacaactggatcgtgtaggaggagtgcaggtgaaggatacgaaaacatactacaagacgcttggtctcggcagcttcggcatgagcgcgctgtcggcggaaatcgacgtcaaggacggcaagatcgttcgcacgagaggcatgcatttcgatcgttcttacggcgccgattatctcaaaccctggacgctcgaggtgaaaggcaaaaagctcgaggggctgctgaaaaacgatattccgccgttcgccctggtgtacaagaagcgcgcgtattccgataaccgcatcctgtaccccatgaagcgcgtcgattgggatccggagggcgagcggaacccgcagaatcgcggtaagtcgaagttcgaacgcatcagctgggacgaggcaaccgatatcattgcgaaggaactccgccgcatcgaaaaggagtacggtttgttcgccgtattctgccagggcgatgggcacggggaaaccaagaccgtgcacgcgacgcacggctgccagatgcggctcatgtcgatactcggcggattcacgtttcaggcgcgcaaccccgatagctgggaaggttggtactggggcgcgaagcacgtgtggggatgcgatccggtgggcgagggcgacatcggcaaccttttgctcgatatcgccgagaactcgaagtatctgctccattggggttgcgacgaggagacgacgccgtggggctggtgcggccaacttccctcaaggtgggctttctggctcaccgaggtgggcgtcaagcagatctacgtgtgccccgatgtgaactacggcgctgccgtgcatgccgacaagtggattcccgtcaacccgaataccgatgtggccctccatatggccatcgcctacacctggatcgcaaacggctggtacgaccaggaatacctcgatacgcacgcggtcggattcgactggatcaaatactacgtcatgggtggcgaagacggcgttgccaagacgcccgagtgggcttctccgatctgcggcgttccctcgcggcagataaaggcccttgccaaagcctggtacaagcgggcgacgtcgatatcgcacgtcaacggcggctccctcatccgctcgcagttctcggcggagcctgggcgcatggaagtggtgctcatgggcatgcagggactcggcaaacccggccgcaacgtgatcaagctgatcgaatggggcctctacgggctgccgtcgcagtgcccgaacccgcgcagcgatctctacatgatgcccgccgcggcgtatcgctcgctcgactacaacaaccctgaagtgtgggatattcgccagtcgttcatccccaaaaccatggttccgaaggcgatcctcggcgactacacggttgacaacccgcttacctggtacggcacgggcatcgcgggttggccgaaggaagatcagttcgtccagtacaaatacccgagcgaaacggccggcacgcgcatccatatgatctggtccgacacgccgtgctggtcgacgtgttggaacgggggctacacgcttgcgaaggcggtccaatcggaggaaatcgagttcgtgctcatccagcatccgtggatggaaaacgattgcatctatgccgatatcctgctgcccatcaacacgaagttcgaagaacgggacatcgcggttgattcgtccaacgggtacaccaacgtcatgatgatcgagcctcggtgcatcgagccgcgcggcgaatcgaaatcggattacgaagcggtcggcgaggtggcgaagaagatgggcgtctacgacgagttcaccggcggtaaaaccgaagaggagtggattcgcgagggcttcgagaattcgggttgccaagagcgtgtgagttgggaggaattcaaagagaagggctattacgcggctccgacctccgagggctgggaggaaaacccccgcgggttcgcgccgttttgcgaagaccccgaggccaatcccctcggcacgccttcaggcaagctcgagttctattcgacggcgctcgcgcatcatttccccgatgacgaatcgcgcccgccgtttccgaagttcatcgccgccgacgaccgtttgtccgaatcgctgctcaccgagcgcggcaagcagtatccgtacctcatcgtgtcgaaccatccgcgttggcgcgtgcatgcgaacatggacgatatcacctggttccgcgagatcgagacctgcaaggtgaaaggccctgacggatacctgtacgaacccgtgtggatcaatccggttgatgccgagccccacggcatcgcaacaggcgacgtcgtcaagatattcaacgatcgcggctgggtgctcgggggcgcatacgtgaccgagcgcatcaagcccggcgtcatataccaggatcacggcgcgcgactcgatcccatcaaggtgggggaggccgatcgcgggggagccaacaacctcatagcgccctccgaagtggctatgaagaacacgaatgcggaagtgacgagcggctatctggtcgatttcgagaaggtcgatgtgttcgagcttgccgagcggtatcccgaggcgttcgggcgagacttcaacgcaacgggcgtgaaaatcgacaattggctggtttaggaagaggagaaaaccatgaaggtatttgtattcgattcgttcaagtgcaacggctgctacggttgccagcttgcctgcaaagacgagcactggaacaacgagtggctgccctatgcgctgccccaacccgataccggccacttctggtgcaagatgacgcagaccgatcatggccaggtaccgaaggtccgcgttgaatacacgccgcatttctgcaaccactgcgacaacgcaccctgcatggcggctgcccctgaagcggtgtacaagcgcgaagacgggctcgtcatcgtcgatccgatcaaagcgaagggaaacaaggctctggtcgatgcgtgcccttacggggccatctattggaacgaggaactcgaagtgccgcagaagtgcacgggatgcgcgcatcttgttgacgagggcgaacttccgcactgcgttgacgtttgcgccacgggcgccctgcgcttcggcgaagaatccgagttcgccgaagaattggaccatgccgaggttttggcctccggggagcacggtccgcgcgtgtactacctcaacatgccgcatctgttcatcggcggggaggtatgggatcccgcaatcgacgaggtgatcgaaggcgcgcgcgtgacgctttccggcgacgtcgacatggccaccgaatctgatgagttcggtgatttctggttcaggcgcattgatgagggcgactacacggtaactgtcgaagccgaggggtatgaggttgagacacgggaagtgaagctcgaaaaaagcctgaacatcggggatattccgctgcgccgcgtcgcgggcaatgaagtcgttgacaaggagaagccggctgtggagttggatgtcgaggcgcccgtcggcgaacccgatgtcgaggttgtcgaagtcggcgatgtgactgcggcgatgtcggtcatgtctcaggctcccgatgaagacggcggcgtaatgagcaaaagcgggatatcgaagaactaggggttctgtctgactaaagcggacttgggcgcatgttttcgccgatagaggcgactacgactcattagcgatgttgcgtgcgccctttcgtaccgttttcaggaatcgcggaagcttcgagagtcgtaccgttttgattcagatcggacgaaactcgatttccgcatcggctcaagcgaaagggggcatttgggcatcatctatctgttgggaaacgtaagacgaaatccaaagaatcgcatcaaggaggattgaatgagtgcgcaaactaaatcaccggtagccacaaaagccgcactaggcacatgggcggtaacgatggttgtgttcggatcgagtgcaacgacaccggccatgaactcgttgtttcaggcgttcgccgaccagccgcagtggcttgtatccctcatcaacacgctgccgtcattgaccacgctggttggctgcctgctgttcggtgcaattgcgaacagtaaaatcaagttcaagaccgttgccatcgtcggtatgttgatatatggcatttttggcattttgccgtgctggattaacgattctctggctgcggtgctcgtcatccgtgcattgaccggatttggcatcggcttcattatgccgctcgggtcgacctggttcatgcgcatgatccgtaatcgtcaggaacgtgggcgttatctgagctggaatcaggcgttcggatcgggcggttcggttgtcatgaccctgctcggcggttggctgtgcgctgtcaactggaagtataccttcctcgcgtatctgttcgtgtttgttggcttcgtcatcatgctcatctgcttccgcgaacccaagaccgttgatgaaataatcaaagaagaaggcgcctctgctgccgaggagttttctcaggcgaagcgcgtcaagctcggggctacttcgtggttcatcgtcatcttctatttctgctttcagcttttcatgtcacccggtctcatgcagctttccgttcttatggccgaaaacaatgcgggcgatgccgctatggcaggcaatctgcttaccattttcgtgctcgttaccgcgatagcgtgcattttcggagacaagtacatcaaactgttcggcaaatacacaacatgcgtgttcttcctcattacggcagccggcttgttctgcatagcctttggcacgtcggcatggatgttcgcgctcggcatggtgttcgtcggcctcggctgcacggttaacttccttgttaacttcgagatcggtctcgtaacgaaagctgcgggactcgcatgggcggcttctcttattatgttcgcgaccaatctcggcaacttttgctcatcgttctggatgggcatcttgcagggcgttggcggtgccgatgccgccacgaacttcccggttgtcgtctgcggcgttcttatggccgttgccggcattctgtttgccgttatgaatacggttaacaagaaggtctggggtaaagacgctatcgcagcgcgccagctcgaggaagaccatcagtaggcgtagcgctcgcatacgccccgtttcagcaaaggcatcgaagcagccgaatcggggtcatcccgattcggctgctttcctattggccttacaacagacaagatatcgagaagccaagcgcggatacgcgctgcagtgaggagtgattatgattacgaaagcagatgacgtcaggctcaacgtgcagcccatctttctggagatggagcatctctataaatacgagggaccgtgccgtgtcggtcaaggggaggctctcgaggtcgggttcgacgccatcaggaatgccgaatggtacaagcggttccaaaaaaagctcgccgacaacatcccggacgaagtggcggatgtgcgcgatatcatccgtatcaagcggactgacaactgggatcaggaagaggaatggtgggatcgccttgcccagacgacgggggataccgatttctacatcatccattcgtttctggggctcgacgacatagccgttgagttcggcgagcgcttcaacaagcctttcagcctcgaacccgaatacgagaatccctgctcgaccacttcggtggcggccgctctcaacgcccgcaaccgcggatacgagttttacgggttcaggacatgggacgagctggtctggcagctgcgcatccttcgcgcccgcaaggtggtcagaacctcgcgcatcctcatggctccgcgcaacggcgcagcgctttcgttcagcggcgttgacggcgcatacgatgtcgaagagctcacccacaaccttggttgccgattccgctatatcagcatacacgagttgctcgaccagacctcgcctgcgcttccgggaggaaaccacacgacgcccggccgcgacacgtgggatatcgacgatgaggatatgaaagagatagaggccatggccgatgatttgatcgagcgagcggaagaggtcgaggtcgatcggcagtacgtcgtcaattcgctcaagttcttcaagacggtgcgcaagcacatggacaggctcgattgcaacgggttcacggcgccgtgccccgatagctgctcgacgcgcaggctgaacgaggagcagttcaccttctgccttgcccactcgctcaacatgcgcgcagggcttccttccgcgtgcgaatacgatgcctgctccgtcattacccagcaggcgctcattgcggtatcggggaagcgctgcttcatgggaaacaccatgccgatcgtgaaagaatccgacgggcaatgggcgacgttcggtctcggcggcatcgaggaagaggatatgccgctgctcgacgagcacgaggggcatctctacatgatggtgcattccgtgcccaatccgcgcatgaacgatccggaaaaagacgctccgtattcgcttcgccactttgccgaggagaagggcttcggggcggtgtatcgctatgatttcaatcgcgacaaaggcaaggtcatcacggttgcgcggttttctcccgacggaagcaagctgctcgtcacgaaaggggtcatcgtgtgcggcaacgggttccatcagcacagctgcaacacggctatcgtgttttcggttgacgatcaggccgatttgttccagaagcagatgcaggtcggaaaccaccttgctacggtctacggcgattacaccaaggaaatggaagcgctcggccgttcgctcggcatcgaggtcattacggtttaatgaagtaaggccatctagggttggggcgatcgagggcgatgctcgtcccaacctttttacggaaggagagacgtatggacgaaggggtgccaagctccataaaggagcagattcgcgcaatgaacgaaaaatcgctcgactaccttcgcgatatacgggaaaaccccgatgatttcatcgccgtatcgaagaacatcaaggctttcgtgctccatcgtttttttctcgttgaagacaacccggataccgatggaatagccgagttgtcaaaattgagcatcgagaagcttctcgaagtgaacaagcgggggatgctgcaagacctttcgaacaactgcgccggagtcagttcggaaacgatgaagaaagctcttctcatcatgacgctgcaaaagcagctcggtgtagttttcgatcctatgaaaaacgatacggtttcgcagcttgcgcaaagcgtcgttgagcagctcggatcttcgtgatctcattctgtttggtgcgttctttcagagactgccgtttacgctgcgtcgtcttcgtgcgccgcagcgtttttgcgggctgcggcgcccctgaggatcgctgcagcgaagaacgccgctgaagcgatggtagcagcggttgcgatgatcgcgaacatcgccgtataggatccgtttgtggccgaggcgaggaaggcgacgaagaagctgcacaggaagttgccgaccagcatgcctatcgaaacataggacatgccaagcgtcactttcgaaacatgggttacacgggctacgcattcgttcagataagggtagaggatgccgcagcacaagccgatgaacgcgatgctgcagtacaccgtgaacggcgttgttgcaacagagagcccgaagtaacatatagcgagcatggcaagggcaaatgccggtacgaatctacccaaccgtttgatgatgcgggcgaaagccaatccgacgaggaatccaacaaacgtttgcacggaacctgccgtgccggcaactgccgatgagccgatccccgaatcgatgacgaagccggaaagcgtcatgttgaatatcatcccgcagcatgagaaaacgcagtttgcggcggcgagcaggtacactgctacgggtacggatatctttcttccctgggaatctttcgctccgagcaggtttttttcgggtccaagcttaggtatgaacttcagttgcatgaaaaccgctatggcgaggatagcgtaaatgtagagacagaccctccatccgaacagggctccgacagtgcctgcaccgaagttcaaaaagaatgcgattatacaggctcccccgttgagaagccccatgacctgcgttctttctctcccctcgaagagctgcgcggtaatggcgggcaccatcgggtagacgagtccggcaccaacgccttcgatcgcacgggttgcaataagaacttcgacgttaggggagaacgacccgaggaatcctcccgctatgaaaatcaaggtgccgacgatcatgaggtttcttttgtcgacgatgcgggccagatgcccggcgatgaatatgacgactaccatgacgcctgacgtaatggaaaaggaaaaattgacggcgtttgaatcttggaacgtctgtgtgatgagtgcgagtatgggcatgtaaagggcagcctgaacctgcccgtctatgctgctgaggatcagcgatgccttgacgaggttcttgttcttcatgggtgttgcggttgctgccatcgttccccctatgcttcggacagcgtgattcatcgtttcgtgcatcgatttcaaaaagctcgaacagatgcggttgcggcgtcgactctcgtcccgatgcgtatcgatatcttcggcagtctttcgggcctgcgcaactgccaaagtgtcctgaatgtcgatttagtactccggtatgagagaatttggcgtcgagcgagataccttgaagaaggcgtttcatgctttcgcctcgatcgcacgttcggtgagttcgataagttcctgctgggtgtgcacgcccattttttggtagatattatagatgtgcgatcttgccgtgtttgtcgagatgtgaagctcttcgtggatgtcctggcgtctcttgccctggagcaaaagcatgtatacctcctgctcccgcttgctgatttcgtactcggcaaagatcgaagagagggcgaaagcgtatagctcgggccgctttgcagaatcggggggcgaatcggagtttttcgcactgatcagcggagccgttatgaagaaaaacgctgcgaacagcaaaaccgaaaccaagaagaacgaatcgactctatgtgaaagcggcccgaaagcgtcgacgtagaagataaaccagcctataagcatgccgcaggtgttgatgatgcgatcgcggctgaaatagctgtacgcaagtttgcttcgatcgatgtcgaacttgcttgtgaatacttgctcgataatatggtagatggcggagagggtgaacaatactaaaagacagatgatcacaactggtttggaaggggctatcgaggcggcgtacaagcaagtcgttgcgaggggtaggagcacaacgaaaaaccatcttggtgggtaaacggggtttgtgccgaggagcgcatacgttgcgaggccagcggtgagatgagacaggccgatgaagagaaaaacccaatcgtcgtaggctttcagcgtgcccagggctccggtaaacccaatgatagttcctgttgcgatggtgaacaatgcgaaattcgactgagggagaccgaggacgtcttttacgctgttctcaaacgattcgtggatgaattcggcatcattggcgcagtgcgcctgtcgctttctatggaaatggcaggtgcaccagagggttgcggaggcgaaggggagcgctgctgtgacaacggatgctgctgcaggatcaagaaactgcatggcggtgaaaattacgccgctgattatgaagggcgtagctgagttacacaaattcgcatggtatgaagaaggtttgagaaaataggaccagcttgcgcaaatcgcggcgacggccgttcccccgaatccccaagcggcgatagccagccattgactttgaagaaacgaactgttgtcgagaaagagaaatagggctagcggaagagagcaggctagaccgaggggaatgaggacgaactgaatcctacgtggcgccagcgtatccgatatgagtttgagcaccagggcggaaaccgcatcggtgaggaaaaataccattctcagcagatgcatgaatgaatcgggctgttcgcttgccgctccgaacagcggactccatacgatggtggcaatgtaggcattgcaaagtgaaaagccgatgcatgccatggagacgttggcgaaaaagcctcgctgcccatttgtttgcgagaatctgaagcgttggttgtcccctagccgtccgatctctgctccttgatacgagtgtgcgatgacgatgtcgtacaagtttgctagactgcgtttaccgtcgcatcccccttgtcgcttatctttctctctggcatcgacaataagtcgtatctgcgtgacggttgtggttttaagtacggttccggttgctttcgggccgcatcacgtatatatcgaacaacacgctgcgaagctgcaagatgggctgtcggcctcccgcttcgaacgcagaaccgaatatcgtcgcgctagaagaggtgcatgggggaactctcggcgtatgggcctacggtcttacgcgcctgcctgtttccccaatgacctccagggcttttttcgcgggcaggggtttggcgaacaggaatccttggatgagactgcagccgctccgttcgacgaacgcgcgctgggattcggtttcgactccttcggcgagcacctcgcttcccatggccttgaatgccgaaatgagatgcttgagaaagtcatctccgtctcgctctctctccgaggcgtgccaaacgatgcttttgtcgagcttgatgatgtcgagcgggagttcgaggatggtcgagatgttcgagaatccggtgccgaaatcgtcgaggcagaactgaacgcctgcttcgtgcatggtcagaatgaacgatctcgccgtgtcgaggttcgagacaagggtgctttcggtgatctcgatcttgatcgaagaggggtcgatcccgctgtcttcgatgatcccgagcgttctctcggccagatcgttttgcatgaacaggatggtcgagaagttaaccgacacgcactcaaggggcgcgtccgggtgctcgtcgcgcacgtttttgacgaacgagcagactttgccgagcgtcagataggtcatatcgacgatcagccccgtttcttcggcgatgggaatgaattcggcgggggagatgctgccgaattcggtgccgtcaaggcggcagagcgcctcggctgagacgaaccggcgcttggggatagaccatatgggttggtagtgggtatcgaacccgtcgtttgcgagcgtggttctcaggatatcggcgatatggtgtttacggcttatggcgcgcaccatatcgccggtgcaccggcagacgacgttcggtccgagccgcttcgattcgcttgcgcaatattcgagcgcgttgacgatggtgctgctgctcgatgcgacgtcggggtacgtgacgacgccgatcgagcacgatatgacgaagtggttctcctcgacctgccagggatcggccatgcggtcctgcagcgtgtcgaggaaagagtcgactttggcgcgccggtctccttcgtagagcgcgacgaactggtcgccgccgtagcggtaaagccagggggtgtcgacggcttcgtgcagatacgatgaaaacgagccgaggaacgcatctccgttttccgatccgaatttgtcgttcagaaatttgaaattgttcaccgaaacgatcacggcggtgaacgggcgctgccgcttcagttcgagggcgaccatcttcgagaattcctgccgattggggattcgggtgagaaaatcgatcgatatctgcttgttttggaggtacaggtacacgatgagcagcgagcatacggctgccgaccccgataagatgtaggtggggaacatctgctggataacgatgaccacgacggccagcacgggaaagagcgtcagtatcctcgtgatggcgggatcgaggtctttgcgcgatgcgaaggcaagcgcaaagcacatgatgcagtacagatagaatacgatgtaggtgacgatgatcagcgagccttggtggtattcgccctgagcgtcgagatagaacaggcagcccgtccaggtgtttgcgactacgcagagaaggtaaagcgcataggggatggcgccgagcaccgcggtcatgcgactgcgatttcgcgcctcggcgatcgtcgcataggtataataaaagtaagcggtgctgataagcggagttgctacgaagtaaagcatagtgacgagccacgtgatgccgatcagctccgccgtttcgttctggatgagcagcgtcgaggcgatgttgagggcaatggcggaaaccgtgatggcgaggcaagcctggaagatcctgtttttaaggctgggggtcaggtagcttttgcgagagtaggcaaggatgatgcatgcgatgatgaacgcgatgcattccgccgtgaaattccatgtcacaggtcttccgtttcgatcgtatcggtataacgatgaccaattgtatcgtatatagcggggaagtgcggcggcagcggtcgcgcattcccgggcttatttgtgtgcaggttgtgcaatcgggctcgcaaatcccaatcaggaaaaaattcttgcgtacacgccaccgggcgtatataattttcgtttgcgtctggtcgtggatggatacacccggacgcgtggaaagccggagtcgtaaacgcctcactccgaaacgggcgttaggcggcaagcggcaccacattggttgataaggtcttttggggtacgcagggagtgtgcgtgcgagcaggagaccgctaagaaaggattgagatgggagtcaagcaatacaagccgaccagtcccggcaggcgcttccagacggtctcggatttcgccgagatcacctgcaccacgccggaaaagtcgctgttgacgcccctgcccaagaaggcaggccgcaacaacaacggtcgcatcaccacccgccatcagggcggcggcgtgaagcgccgttaccgtatcatcgatttcaagcgcaacaaggacggggtgcccgccaaggttgcgaccatcgaatacgacccgaaccgctcagcgcgcatcgccttgctccattacgctgacggcgagaagcgctacatccttcatccgaagggtctgcgcgtcggcgataccgtcatgagcggtgtcgatgccgatatcaagcccggcaacgctctgcccttgtcggcgatccccgtgggcacgcttgtccacgcagtcgagcttcaacccggccgcggcgccgcaatcgcgcgttccgccggcacgagcatccagctcatgggcaaggaaggcgattacgccatcctccgcatgccctcctccgaaatgcgtcgcgttctcgtgacctgccgcgccactgtcggcgaggttggaaacgccgagcacggcaacatcaagatcggcaaggccggccgcaaccgctggaagggcatccgcccgagcgttcgcggtaccgttatgaacccggtcgaccatccgcacggcggcggcgaaggcaagaacaagtccgctggtcgtcatccggtcaccccgtggggcgttcctaccaagggccatcgcacccgcaatcccaagaaggcttcgagccgcttgatcatccgtcggcgcaagaagtagcgcgagcgcataaggagtagatgtgagtagaagtttgaaaaaaggtcctttcgtcgaaccgcgccttctcgatcgcattgaggcgatgaacgcggcaggcgagaagaacgtcatcaagacctggtctcgtgccagcaccatcttcccggaaatggtgggccacaccatcgccgtgcacgatggccgcaagcacgtgcccgtatacgtaaccgaatccatggttggtcataagctcggggaattcgcgccttcgcgtacgttccgcggccactcggccgacaaaggcaagcgataggaggacgcgagcatggaagctaaagcagtatcgcgtttcgtgcgcgtctcgcctcgcaaggcccgcatcgtcatcgatcagatccgcggcaagtccgttccggcagcccgcgagattctcaagttcaccaaccgcggcattgccgagacggtcgagaagaccctcaactctgccgttgccaacgccgagcacaaccatcacgtgcgtgccgagtcgctggtagtcaagaccgcattcgccgacgaaggcccgacgctcaagcgcattcgtccgcgtgcaaagggctccgcttcgcgcatccgcaagcgcacgagccatatcaccatcatcgtcgcaacacgagaggaggcataaagcacatgggtcagaaagtcagccccaccggattccgtctcggcattaccgaggagtggcgcagccgctggtattcggataaggattacgcgaagaacctggaaaacgacctggctattcgcaagttcttgaacaagtatctttcccgcgccgccgtctccaaagtggaaatcgaacgcgccggtgataagatcaaggtcatcatcaccacggctcgcccgggcgttgtgatcggcaagaagggtgccgagatcgacactctgcgcaagaagctcgacaagatcgccaacggccccgtttcggtcgaggtcatcgaggtcaagcgccccgaactcgacgccgttctcatcgctcagagcgttgccgagcagctcgaaggccgtgtggcgttccgccgcgcgatgcgcaaggccgtccaatccgcccgcaagagcggtgcccagggcatccgtatccagtgcgcaggccgtctcggcggtgccgagatgagccgccgcgagtggtatcgcgaaggccgcgtgccgctgcatacgctgcgcgccaagatcgattacggtttcgccaccgctgccaccaccatgggttccatcggtgtgcaggtgtgggtttaccacggcgaagtgctccccggccagaaggctccccagcccgcgctcgagggaagctctcgccccaaccgttcccgtcgcaacgagaggggggcaaagtaaatgctcgtacctaagcgtgtcaagcaccgcaaggtgcagcgtggttcgatgaagggcaaggccaagggcggcacccgtttgaaccacggttcctacggcatccaggcccaagaggctgcctggatcacgaaccgccagattgaggctgcccgtatcgccatgacccgtcacatgaagcgtggcggtaaagtgtggatcacgatcttccccgacaagcccattacgcagaagcccgcagaaacccgcatgggttccggtaagggtaatcccgaggcttgggtagcggttgtcaaacccggccgcatcatgttcgagatcgacggtgttgatgaggagaccgccaaagaggcgcttcgtcttgccatcaacaaattgcccatcaagtgcaagattgtttctcgcgaaacggaagggcaggcataaatgaaggcagcagagattcgcgagctttcggctgaagatttgcaggcgaagcttaaagaagcacgcgcagagcttttcaatctgcgtttccagatggccacgagccagcttgacaataccgctcgcgtgagtcaggtcaagaaggacatcgcccgcatccaaaccgagatgcgcgcccgcgagctgagcgcttaagcgaactgaaaggttaggtagagaataaatgagtgaagaacgtaattctcgcaaggttcgccagggcgtcgtcgtaagcgccgcaggcgataaaacctgcgttgttcaggtgaaggaacgcaagccgcaccctgtgtacggcaagatgatgacaagcacgaagaagtttcatgcccatgacgaggaaaacgccgcaggcgttggcgacaccgtcatgatcatggagaccaggccgctgtccaagctgaagcgctggcgcctgctcaagatcgtggaaaaggccaaatagtctgcttgtccgcattcagactatacgagatgaaagttaggttacagcaatgattcagatgcaaaccatgctcgcagtggccgataactccggcgctcgcaaggtgcagtgcatcaaggtcctcggcggctcgaagcgccgctatgcagggctcggcgatgtcatcatctgcagcgttaaggaagcggcgcctaacggcaacgtgaagaagggcgaagtcgtccgctgcgtggtcgtgcgcgtgaagaaggaagtccgtcgctcggacggcagctacatcaagttcgatcagaacgctgccgtgcttatcgacaacaacggcgcaccgaagggcacccgtattttcgggcctgtcgcccgcgagctgcgtgacaagaagtacatgaagatcgtgtccctggcaccggaaacgctgtaagggggtatacgcaaatggcaaagatgaacatcaagaagggcgataaggtcaaggtcctgaccggcaaggataagggcaaggagtccgtcgtcctgcgcgcgctgcccgagaaggagcgcgtggtcgtcgagaaggtcaacgtcgtcaagaaggcgcttcgcccgactcagcagaatcctcagggcggcatctcgagcgtcgaggctccgatccacgtttccaacgttgcgatcgtgtgccccgagtgcaagcaggccacccgtatcgcgatcaagcgcgaagatggcaagaaggtccgttactgcaagaagtgcggcaaagccatcgacaagtaaggaatcgaccagaagcccgggcattcgggctttcggtttaggtacacgcaagcatgacccccgccagcgggggacgcagggtcggaaatcctgtgtttaattcatcgaagagaggttacacaacatggctattcctcgtttgaaggagcagtacaacaccgagatcgtgccggcgctcgaaaaagagctcggcgtcgataacgtcaacaaggttccgcgtctcgagaagatcgtcgtgaacatgggcgtcggtgccgcttccaacgattcgaaactgcttgatgcggctatggccgacctgcgcaccatcacgggtcagcagcccgccatcacgcgcgccaagaagtccatcgcgggtttccatgtgcgcgaaggccagcccatcggctgcaaggtcacgctgcgcggcgaccgcatgtgggagtttttggatcgccttctggcgacggcgcttcctcgcgtccgcgacttccgcggcattccgacgacgagcttcgacggccgcggcaactacacgctcggcatcaccgagcagctgatcttctcggagatcgaatacgacaaagtcgatcgtacgcgcggcatggacatcacgttcgtgaccaccgccgaggataacgagagtgccttcgcgctgttcaaagcgcttggcttcccgttcaagaattaggaaccagaactcgaatgccatcgagttggttataggaaagaaggaattgcatggctaagaaatcgatgatcgccaaagctaagcgcgagccgaagttttcgacgcgccagcacaatcgctgcactcgctgtggtcgcccgcgtgcgtactaccgcaagttcggtctgtgccgcgtctgccttcgcgagcttgcgaacaagggcgaacttcccggcgtgaccaagtcttcctggtaggacctcgagactttattcggtacgcaacgggtgtgccgtcggtataggcggaggcgctacgggcgccgacgaaccggacccccggctcatcacgaaccaaaggagaaacaatgagcatgaacgaccccattgcagatatgcttacgcgcgtgcgtaacgcaaactctgcaagcaagccgacggtttccatgccgtcgagcaagaagcttatcgagatcgcccgcatcatgcaggaagagggctacatcgtgggctacgagatcgagaagggcgaaccccgcgatactctcgagatcacgttgaagtacggcgataagaaaagcaagacgatccgcggcttgaagcgcatctcgaagcccggtctgcgcatctacgccggcaaagacgagctgccccgcgttctcggaggcctcggtacggctatcatctcgacgagccacggcgtcatgaccgaccgcgatgcccgcaaagcaggcgtgggcggcgaagtcatcgcctacatctggtaggaaaggaagggatttagatatgtctcgtatcggcaaacaacccatcgccgttcctgctggcgtcgaggtcaaaatcgacggatccaccgtttcggtcaagggtgcgaagggcgagctgtcccgcacgcttcccgaaatgatgatcatcaagcaagaaggcgacgaaatcatcgtcgagcgtccggacgacagccgcgaagccaagagcttgcacggcctcacccgtacgcttgtcagcaacatggtcgagggcgtgtccaccggcttcaagaagaagctcgagcttgtcggtgtcggttatcgcgccgcgctcaagggtaccgatctcgaaatgcagctcggttattctcacccggttctggtcaaggctcccgaaggcatcaccttcgaagttcccagccagaccgaaatcatcgtttccggtcccagcaaagaagcagtgggccaggttgcggcgaacattcgcaagtggcgcaagcccgagccgtacaagggcaagggtatccgctacgagggcgaacgtgtccgtcgtaagctcggcaaagctgccaagtccgattaatcgcgatcaccgtagctgagaaaaaggactgaagggaaactatcatgaagaaacttaaagcaaagcaagccgggctgcgtcgccgccacacccgcgtccgcgggaagatctccggaacgcccgcccgtccgcgcctgtgcatcacgcgcagcaattcgaatatgtacgctcaggttatcgacgacgttgcaggaaagaccatctgcgcggtgtctacgctcggccctgacttcaaggcgaccgagaaaagcggcgcgaccgtcgagggagcttctgttctcggaagcctgatcggcaagaaagcgatagagtccggggtcacggaagttgttttcgaccgtggcggaaacctgtatcatgggcgcatcaaggccgttgccgacggtgcccgtgaagccggcctgaaattttagaaggggttagaagcttatggctcgtaaacagcaagataaccaggcagcggttcctgagcttcaggaacgcgtggtctacatcaaccgcgtttccaaggttgtcaaaggtggccgtcgtttcgccctgactgcgctcgtggtcgtcggcgatggcaacggtcgcgtgggcgtcggcatgggcaagtcccaggaagtgccgatcgccatcaagaagggtgtcgaagacgccaagaagaacatgttcaccgtgcctctgaccgccgagaagacgcttccgcatgatattctcggcgaatacggcgcaggtcgcgtgctcatcaagcctgcgactcccggtaccggcgttatcgccggcggcccggtccgcgccatcatggagctcgccggcgtgaccgacgtgctcaccaagtcgctcggcaccaacaatgctatgaacatcgtgaaggctgccgccgagggtctcaagaacatggagagtcccgaagaggttgccaagcgccgtggcatttcggtcggccagatttatggctggaaggagaagaagtaaccatggcagagaagactcttcgcgttaagcaggtcaaaagcgcaatcgcgtgtccggccgatcagggtaaaaccctgaaggcgctcggactcggcaagatcggccgtacggtcgagcaggtggacaacccctgcgtgcgcggcatgatcttcaaggttaagcatctcgtagaagtcgaagaagcctaaacggcttcttcgttttccgtatatactgctcgattgagaatagtatatacttacccggaagtttgctggcggcgagctgccagcatcgggcatgggcccgatacagcgaatataaaggagaactaccaatggaactgaaagatctcgtacccgcagaaggatccaagaaggcccgcaagcgcgttggccgcggccccgcatcgggcaccggcaagaccgcaggccgcggatataatggtcagaagtcccgcgcgggcggcggtaagggcacaggattcgagggcggccagacccccttggcgcgtcgtcttcccaagctccccggtttccgcaacatcaaccgcgtcgagtacgtgccggtcaatgtcagccgtctcgatgcgtatttcgaggcaggggagaccgtcgatggcgacagcctgaaggcgaagggcatcatcaagcactccgatgcgctcgtcaaggttctcggcgacggcgagatcaccaagtctttgaccgtgaaggttgataaggtttctgcttcggcgaaagcaaagatcgaggcagccggaggaaaggttgaagagccttgctaagctcaattgttgatgcattcaaggtcccggagctgcggaagaagattctcttcacgcttgccatccttgccctgtatcgcttcggggcgtacgttccggtgccgggcattccgttcaacgagttcgccagctcctttcaggatgccggcgtttcgatgacgatgctcgacctgttcaccggcggcgctctctcgaacttctcggtgttctcgctcggcatcatgccctacatcaccgcatcgatcatcatgcagctgatgcagggcgttatcccggccgtcgggcgttgggcgaaggaaggcgattcgggccgtaagaagatcacccaggtcacgcgttatctgacgcttggccttggtctgatcaacgcgatcggctacctcttcctgttcaagtcgccgcagtacggcgtcgtgttctcgaccgaggtccccgagctcctgaccgacatcctcgtggtgttcacgctggttgccggcacggccttcatcatgtggatgggcgagctcatcacgcagcggggcatcggcaacggcatgtcgctcatcatcttcgtgagcatcgtaagccgcgtcccgtctgccatcttctcgtcgatcaacctgcaggccgatatggggatgggcattgcgataaccgcgctcatcgtggtcgtcgtgcttgtctgcataccgctcatcatcttcgtcgagcgtgcccagcggcgcattcccgttaactacgccaagcgcatccagggccgcaagatgatgggtgggcagtccacctacatcccgctcaaggtgaacgctgcgggcgttatcccgatcatcttcgcaagctgcctgatctatttcccggctcagatcgccgcgctgttcaacgtcgaatggctcacgggtttcgccaatgcgatctcgaccggttgggtcaactggatcatcacgctcgttctgatcgtcttcttcgcgtacttctacacctcgatggtgttcaatcccgaagagacggccgataacctgcgcaagcagggtgggttcgtgccaggagtgcgtcctggatcggccacggtgcagtacatcaagaacgtgatcaaccgcgtaacgctgccaggcggcatcttcatcgcgctgatcgcggttgtgccgagcatcatcttcttcttcacgggcaaccagctcatccaggcgttcggcggcacttcgatcctcatcatgatcggcgttgccctcgacaccatgagcaagatcgaatcccagctgaagatgcacaactacgacgggttcttcaaataaagcatgttgcaaacggaaggccctggtcaaaatgctgaccagggcttttttcatccgttttgacccgtcgtgtacaagattcgcacaaattcacgcgttttgctattgcgtatgccccgctcagagcattgatcggggcgtttttgcattccgagatgcttttctttgcgaaggcgttctaaagcggcagtcgcggaagatcttttcgcacgaaattcccaagcggcggctccggaaaggcttctcaggtgaagagtccttggaggcggcagttatgtaagagatttctatcatgaaaagaccctgaaaatggcggtcaaggcaagcttctgtagtcatttggcgtcgtaggcggtcactcgtggtgctatctgatagcgttgacaggtgtttctcctgttcacggaaatgaaataagttactaacagggcgtaattctgacagaagcttgccttgaccgccattttcggggcgattttcgcaagggaactccttacacagcactcttgatacacagcactcttgaggcgccgttgtgcgcagttcggccgatgcgacaccgttgcaatccggcatctcctaccgtacgatccgcggcgctctgccgcagcctcgcgtcgtctgccacgtgttctgcgccacgtccggtgggcaagcgggcgacggccgcagccgcccgcatccgatgccgccgtccgccatctgcgttgacgcgcagtttcgggatgtcgttcgagtgtgcgaaaggaattcagacgacggttctcaacgcgccgtcagcgagtgataatgagctcttatgctgcgaatcttttaaaaaagccgtcatgcacgtgctgctttgctacaatacggtgatcgttgtgagcgaaaggatttgaacatgaatatcgtgttgttgggggctcccggcgccggcaagggcacacaggctgccaagctggtcgaggagtacgaacttccgcatatctcgacgggcgacatgctccgcgccgccgtcaaggagggaaccccgctggggaagaaggcgaagtccttcatggacgccggggatctcgttcccgacgatgtcatcatcgggctcgtgaccgagcgcctgcagagtaaagataccgaaaagggtttcatcctcgacggattcccccgcacttccgcgcaggccgttgccctcgacgccgagctttccaagctggagcgcccgctcgatgcggcgctgctcatcgatgttgattccgaagtcatcgtcggccgccttacctcgcgccgcatgtgcaaggattgcggctacatcggtacggccgcagatgccacctgccccaaatgcggcggcgagatgtaccagcgcgacgatgacaacgaagcgaccgtgcgcaaccgcctcgatgtgtacgagaagtcgaccgctccgctgatcgactactatcgcggctgcgatctgctcgtcgccatcgacggcgatcgcgatcccgatgtcgtgtacgccgacgtgaagaagagcctcggcctgtaaagagccgcgcagatttcgctgcgggggctctgcacgggctttgcgtgcgaaatagcggtttcggacaaccaagtaggggtcggcgtattgccggcccttttgcgctcttgtcggttcgtgcgtttgtcgtagtccgcggagggctaatcgcgtataatctgtagcgcttatgccaagtttatgggaaaagatcagaaggatcgtcggcgactatgcgcgtgcgaacagggctgccctggtgcatatcgcgaaatgcgtagccgttgtattcctcgtggcgacgttgctcgaggtattcgtcttcaacatcaactacttcgcctcggcaggctacagcaccatcgatttgacgagcaagctcgatctgcaggaaacgcacgatggggataagacccagtaccggctgaccgaggtcgatcacgtcatagagttctcgaacctcaacaccgaggttcgcaacctgcggctcgatttcgatttcaagcagcccgcccaggcgcttcaggtcaagatccagtttaccgacgaagcccatcacacgtatttcgactcgacggaatacactgtgggagttcccacgacgaccgtatccacgttcgtcgaccagagcgaatacatcaacctcaacactgcagggcttgtggacaacctgcgcatcgagatcgtcggcgacaacgtgcagtacccgatccttctcgacggcatcgccgtcaacgcgcatcatccgttcgaattcaatacggcacgctatttcatcgccctcggcattcttgctctcatctgcgttttcaggccgaaatcgagcatttaccgctgtttcatcgtcgagcagccccgccgctcgaaggccattgtcgtcgcaacggttgtcgtcgaggtgtatctgatggcgacattcctcttcttcggctcgaaccttgtgggtgtggccacctcttcgtacaacttcggggcatgggatggcacgagcatcgtcaacacgttcgaggtggggggagacaacgcccagcagtacgccgagcttgccaaggccatgtcgaaggggcagctctatctggaagaggagcccccgcagtggctccaggacatggatgacccctacgacaagggagcacgcgacgaagcccagaaggtgacgggggagtcctacctgttcgatgtggcgtattacgacggccattactacgtgtatttcggagtggtgccggttctgttgttctatcttccctttttcctgataacgggagctaattttccaaccgccatcggcgtgctcatcgcgtgcatcgcgttcgtgctcggatgttctgcgctgctcgatcgttttgcgcgctaccactttaagcgagtgagcctcggactgtacctgctgttgcagattcccctggtcttctgctgcggggttctctacttgctgaagttccccacgttctattcgctgcccatcatgctcgggctggcgttctcggtgtggggcctgtatttctggatgaaggggagaacgtctgcttcgccctgcaagtggtacttggcgggctcgttgtgcatggctctcgtcgccggatgccgacctcagctgcttgcgttctcgttgcttgcgttcccgctgttctggcggctgtttattacgaagcgccacctgtttacaccaaagggcgcccgggaattcgcgtgtctggttgcgccgtatctcgtggttgcggcggggcttatgtggtacaactgcgcccgcttcgggtctccgacgaattttggggcgaactacaacctcacggttaacgatatgaccaagcgaggtttcagcgcggggcgccttgcacctgcgtttttcgcgtacttcctccagcctccgtgcgtaacgggcgtgttcccgttcgttcaagccgctccgttcgatacgacctacatggggcagaccatcaaggaagtcaccttcggaggcatccttgcgtgcctgcccatcctgtggatcctgccgttttcgaagcgcatattgcggatgcgcgttgcccagcggtccacgcgcacgatcgctggagtcatcatcgtcttgctgtcggcgggtgtgctcgttgccttgctcgacgcgcagatggcgggaatcctgcagcggtacttcgccgatttcagcttcatgttccttgcagctgccgttcttcttgcgtttatcgtgaacgagaacctcgatcaggggtcggtgacgcgcgatcttttgatgaaggtgctcgtcgttctcgtttccgtaagcctgatctacagccttctcgtgtgcttcgtgcccgagacgggttggtattcggacgtgtatccctgggcttatcagagcgtgatagagacggctcagttctggacgtaggcaagaggttcgatggataaggaaacgcagcgcaaaacccctcaagcgcctcctgcatcgtccgaggccgtccacaagtcgatgcagtcgaacaagcgccagaacaccaaacccgaattgctcgtgcgcaagcggctgcgcgaagcggggctgaccggctaccgtctccagtggaaggtgcccggcaggcccgatgtcgcctggccgggaaagcgcgtcgccttgttcgtcaacggatgtttttggcacaggtgcccgcactgcaacttgtcgcttccgaaatcgaacgtcgagtactggcacatcaagttcgaacggaacgtggagcgcgacgagagaaacctcgccgcgcttcgggatatgggttggcgcgtgcatgtcatctgggagtgccagctcaagaaaaagaagatcgacgagaccttcgccgagcttctgcccgtattggccgaagagcttgggaagaagctcggcggcgcctgcgaggatgcggatgcgccatgcgacggcggcgatccggggaatcgcatggccgatgcggcgggcgcgtgttcgggcgaaggcaccgatgccgatcgctcaggtggcgtttagccggctgggtgctgggcgaggcgagggcttcggctcgttgctgcagttgcctcacacgttcccttcataattctggccgcttgccgattggagcgaccgcgccatgctgcccgtcaagctcgacgcggagagcggcgaattcggactggtatcatgaacgccgtgtatccgaccagacgaagttcggccagacgaagattttcgagcgggagggaaaggccggggttgcccggtacccgttcggatgcgtgcgatcgtgcggttgcgcctcatcttcgagcttcgggtcagagagaaatcccttcaaaaggagaggtgtatgacgagagaactcaaatccatggacggcaataatgctgcggcgtacgtctcctatgcgtttaccgaggtagcgggcatttaccccatcactccgtcgagccctatggccgacctggtggatcagtgggccgctgccggccagaagaacatcttcggcaccacggtaaaggtatgcgagatgcagtcggagggcggtgccgcaggtgcagttcacggttcgcttgctgccggtgcgctgacgaccacctacactgcttcccagggtctgcttcttatgatccccaatatgtacaagatggcagccgaaatgctgccgagcgtgttccatgtgagtgcgcgtacggttgcaacgcaggcgctcagcatcttcggcgatcattccgacgtcatggcatgccgtcagaccggtttcgccatgctcgccgaaagcaacgtgcaggaggtcatggacctgtctgccgtagcgcaccttgccgccatcaaaggccgcgttccgttcatcaacttcttcgacggtttccgtacctctcacgaggtgcagaagatcgccgtgtgggattacaacgatcttgccgatatgtgcgatatggatgcggtgcgcgaattccgcgagcatgccctcaatcccgagcgtcccgccatgcgcggctcgcatgagaacggcgatgtgttcttccagcatcgcgaagcatgcaacagccactatgcggcgttgcctgcggttgtcgaagactacatgcatcaggtgaacgcgaagctcggcaccaactacgaactgttcaactactacggcgctcccgacgccgatcgcgtgatcgttgccatgggctcgttctgcgacgtcgtcgaagaggtcgtcgattacctgaacgctcacggcgagaaggtcggtcttgtgaaggttcgcctgtaccgcccgttcgtgaccgagaaattcatggccgcgcttccctcgaccgttaagaagatcgcggtcatggaccgcaccaaggagccgggcgctgtgggcgagccgctctacatggatgtcgtcaatgccctcgtgcacgagggacgcaccgacctcatcgtggtcggcgggcgctacggccttgcttcgaaggacactcctccttcgtcggtgttcgcggtttacacggagctcgagaaggatgctccggcgcgcgagttcacggtcggcatcgtggacgatgtgacgaacctctcccttcccgaagatccggcgagccccaatacggctgcggagggaaccatcgagtgcaagttctggggcctcggcggcgacggcaccgtgggcgcgaacaagaactcgatcaagatcatcggcgatcataccgataaatacgtgcaagcctacttccagtacgattcgaagaagaccggcggcgtgacgatcagccacctccgcttcggggattctcccattcgcagcacttactacatcaacaaggcggacttcgtcgcctgccataatccgtcgtacgtgaccaagggcttccgcatggtcaacgacgtcaagccgggcggtacgttcatgattaactgccagtggtcgcccgaagagctcgagcatcatctgaacgccgaggcaaagcgctacattgccgaaaacgacatcaagctctacaccatcaacgccatcgacctcgcccaggaaatcggcatgggcaagcgcacgaacaccatcctgcaatcggcgttcttcgcgcttgcgaacgtgattccccaggccgaggctctgcagtacatgaaagacgctgcgaccaaatcctatctcaaaaagggtcaggaagtcgtcgacatgaaccatcgcgccatcgaggccggcgctaccgccttcgtgcaggtcgaggttccggcaagctgggccgaggcgaccgacgaggccgaggcctccgagcttgcgggccgtcccgagcttgtcaagcaggtcgtcgagatcatggagccggtgggccgcatggacggcgatcgcctgcccgtctccgcgttcgtcgcgcatgccgacggccagttcgagcagggtgccgcggcttacgagaagcgcggcgttgccgtgagcgttcccgagtgggatgcagcaacctgcatccagtgcaaccagtgcgcgttcgtgtgtccgcatgccaccatccgcccgtttgcattgaccgagggcgaagccgcggctgcaccctctgccatcaagctcgttccgatgaagggcaagggcaacgacggattccagtacacgctggccatttcgccgcttgactgcatgggctgcggcgtgtgcgtgaacgtgtgcccgaccgattcgcttgccatggttgcgcaggaagacgagcttgcccagcaagacgtgttcgcgtactgcgtgacgcaggtctccgacaagcccgagctggaagatgtcagcgtcaagggcagccagttcaagcagccgctgctcgagttctcgggcgcctgcgccggctgcgccgaaaccgcctacgccaagctcgtcacgcagctgttcggcgatcgcatgtacgtggcgaacgctacgggctgctcgtcgatctggggcggtcctgcggcaacgtcgccgtacgcgatcaacaaagacggccacggtcccgcgtggtcgaactcgctgttcgaggataacgccgagcatggtttgggcatgctgctcgggcacgaggccgtgcgcgacaagctggttgccgatagcgagaagcttctggcatcgggtgccgacgaagcggcgaaagctgctgcgcgggcttggatcgattccatgggtgccgcggaggagagcaaagaggcttcgcaggcgtacatcgccgagctcgagagactggccgcatccgatgacgctgcggtgcgcgatattgcagccgccgtgcttgagaacagggaatacctgaccaagaaatccgtctggatcttcggcggcgacggttgggcctacgacatcggctacggcggactcgaccacgtgctcgcttcgggcaaggacgtcaatgtgttcgtgttcgataccgaggtctactccaatacgggcggacaggcatcgaaagcttccaatatcggccaggttgcccagttcgccgcctccggcaaggacatcaagaagaagagcctcaccgagatcgccatggcgtacggctacgtgtacgtggcccaggttgccatgggcgccaagccggcgcagaccatcaaggccatcgcggaagcggaggcctatcccggaccgtcgctcatcatcgggtactcgccctgcgagatgcattcgatcaagggcggcatggcgaactgccaggacgagatgaagaaggcggtcgattgcggctactggaacctcttccgcttcaatcctgaagcgccggcgggcaagaagttcgtgctcgattccaaggaacctgcgggcggttatcaggagttcctgatgaacgaggctcgctacagccgcttgacgcgcgagttccccgagcgcgcgaccgagctcttcgagcgcaacgagcaggctgcgctcgatcgctacgaacaccttctgaagctcaaggaggtttactccgaggcgtaagccttggggcgagggtacaaaggaaaagaggcttggacgataatcaagcctcttttcttgtatagtatgcacgtacgtaaaatgaccatgcaccaaacaaggaaggaaagagggacccaatggcagaactacccctgatcttgggcctggtagcgggcgttatcgcagccatctacgcaggtgtcttgatctctcggatcaacaagttgccagcaggcaacgaaacgatgcaaggcatcgcatcggctatccaggaaggcgccatggcgtatcttggacgccagtaccgcaccgtcgccatcgtaggcgtcgtcgtggccgtcgtgctgctcgtgcccggtttcttgggcgtatcgggcttcggaatctggacggcgatcggctttatcgtcggaggcgtcgcatcggccgccgccggcttcatcggcatgcgcatttcggttgctgcgaacgtgcgcacggctgaagcggcacgtaccgggctgggccatgccctgcgcgtggcgtttcaatcgggcaccgtcaccggtatgttcgtgatcggattgggcatcctttcggtgtccgtcatgtcgtttctcgtgttcgcgggcatcgctccgttctccgcgctcgtgggcttgggcttcggcggttcgctcatttcggtgttcgcccgtctcggcggcggcattttcacgaaggcggccgacgttggagccgaccttgtcggcaaggttgaagcgggcatccccgaggacgatccgcgcaaccccgccgtcatcgccgacaacgtgggcgacaacgtgggcgactgcgctggcatggccgccgacctgttcgagacctatgttgtgaccaccgtggcagccatgctcatcggcaaccttgcgttcggcgatggcaacattgccgtttccctcgggttccccgtgatcatcggcgtcgcgtcgatcatcgcgtcgatcatcggcacgctgttcgtgaagatgagccagggcggcaccattatgggcgcgctttacaagggtctctggatttcggcgatcatcgcgattgtcgcgttcttcccgatttgccagtggatgctcagcgatgtcaccgtggtgaacacctcgctcgctccggtcggcatcacgcctctgtccatctggatctgcgccgtgatcggcgtcgttctgacagcggccatggtttacatcaccgaccactacacctcatctgagaagaaaccggtcgaatccatcgccgaggccagcgtttcgggccacggcaccaacgttatccagggcttggccgtgggcatggaggcaaccggcctcccgatcctcgtgatcgtcatcgccacgctcgcgagcttcttcctgggcggcatcttcggcatcgccgttgctgctctttccatgctctcgatggccggcatcgtcgttgccatcgactccttcggccctgtgaccgacaacgcgggcggcatcgccgagatgagcggtttgcctgagagcgtgcgcgagaacaccgacgcgctcgatgcggtcggcaacaccacgaaggccgtcaccaagggttatgcaatcgcgtctgcggctctcgccgccgtcgtgctgttcgccgacttcacccacacggtgaccgaggagaccggcgctgtgttctcgttcgacttggcgaatccgttcgtccttatcggcctgttcatcggcggccttctgccgtatctgttcgcctcgcgcgcgatgacgagcgttggcaaggctgcaggcgacgtcgtcgaagaggtgcgtcgtcagttcaaggagatccccggcatcatggagggtacgggcaagcccgactacgcgaagtgcgtcgacctcgtgaccaaggcggctctgcgcgagatggttcttccggctatgatcccgatcggcaccccgatcctcatcatcatcgtcggtttcatcctgaacgcgatcggctacccccaggcgttcgagttcaccacgcttgttctgggcggtgcgctcgtgggcaccatcatcaccggcctgttcgtcgccatttccatgacgagcggcggcggtgcgtgggataacgccaaaaagctcatcgaagagggcaagtacggcggcaagggctcgttcgcccatcaggctgccgttaccggcgacaccgtcggcgatccttacaaggataccgcgggccccgcgctgaactccatgatcaaggtgttcaacatcgtggcgcttctgctggttccgctgctggctctgcttgcataaagcacgcgttcgatcctgtttcgagagggccgacggcatggcgccgccggccttttttgctgccgaggccctgcaactgggcagtcgctggcgattcttttgcaaagcgcctggcgaagcggcgattcgagactctggctattcgagactctgaacgggttggcgccgaccctcggcggcgaggtcccgatcgacggccggcgcctgaacgccccggatttgctcgctttttgccagattcatacaaacgaacccccttgaatgccccgcgaagccagcccgcgatctgcaagctgggcaaacggcgcagcttgcgagcagaagcgtgcagaaaaggcctctcaggccctttttcgtgtatgaatctggcaaaaagcgagcagatcaggggctgatcggtttttcgctaaccttgcttcgctgctgaatcgtcgtcggcatgtccctgtcgcttgcaaatgacgacccgcatcccgatcgcgtgggttgtcgtgcatctatgtcggtaagaatttggaaaggtataattaaggaattctcaatgacgaaaaaatagccattaatctttgcagctcgtaatctcattgtaggcgcaggaatgcgccgctcctagggggaagacacgcatggtaaggaggatcaatgacgagctatcttgaaaaggttcggcaatcgtcggagttgagccgaaggagtttcctgaaggcaagcgcggcggccacggcggctttggctgtttcggggggattggcgggatgctctccgaataaagtcgaacccgttgaagaagctgaggcggtcgcgcgagacatcgtgaccggagaatggaagacggcagcctgctggcataattgcggcggccgatgcctcaacaaggttttggtcaaagacggcattgtcgtgcgccagaagacggatgatacgcacgaggacacgttggagcatcctcagatacgcgggtgcctcagagggagaagccagcggcagcaagtttttggagccgatcgtatcaaataccctctcaagagaaagcattgggagcctggcggcggtcaaaaagagctccgcggttgcgatgagtgggagcgcatttcgtgggatgaagcgcttgattacgtagctgttgaactgaagaaggcatacgagaactacggcccgacgggggtctattacgtcggatggccgttgggatacggtctgaggattgctgcggcactcgggggagccgtgcggtgcgtcaactcatcgtcgtacggcacgtttaacttctattaccgaagcatcgggttgccgtacgtaggggtggggcctggcacctattggtgcgaaagtgcaaacgatcgcctcgatcttgtcaattcggacacgatcgttttctacggatgcaatcccgcatgggcctctgccggcaatcattgcagctatttttggcgagctaaggaagcgggaaccgatttcgtttacgttggcccgagctacaacccatcggcttcgctgttcgaggcgaagtggattcgcgtgcggccgggaaccgatgtagcattcctgttgtcggttgcctatacgatgatcgccgaagatgagcaaaaagagcttatcgactgggattttctctcgaagtacacggttggatttaccagcgataccatgcctgccgacgctacgacggacgagaactttcacgactacgttttgggcaattacgatggggttcccaaaactcctgagtgggcgacaaccatttgcggtacgccggttgaagacatcgtctggtttgccgagaccatcggcaagaagaataaggtagctattctgcatagctttgccgcagcgagaaacaagggggcggaagactttcctcaaatgctcatgaccattggcgccatgggcggtcatatgggaaaatcagggcattcgtgcggatcggcttttcactcgactgccggcgctggcgggccctcccttgtaacggttgggggatcgggactcgatatcgcttttggagagctgaactaccaggtccccgatcctgagcgctggaaggccgttttggatggcaagttcgtcgatataggtgccggcatcgactttgccccgtttcccgaggcggttgagcgggaggtcgatatccatgtgatcatggtcgatgacgtatcgaatttcctgcagagcagccttgacatcatggctggaatcaaagcgttcaggaaagtcgatttcgcatactgccaagcgtataccctgacaacgtcggcgaaatactgcgacattattctgcctgcctgcacgcagtgggagaagacatccgcgttctgctatctgaacctatcgagtcgcgagtaccagatatacccttcgcaaattaccgaaccgcttttcgaatctcggaccgattacgatatagcatgcggaatcgcggagagaatgggactcgatcccaagcaggtaatccccttagacgacaagcagcagtatttcaacgcgatcgcaacttccgtaacaacggaggacgacggcatcaccagctccaagcttgcaaccatcacccaagacgatatcgatgagtggggtgtcgagggagagccccaagaggggaaaatcggtatcggcgagttgatggaaaagggaatctatcaggttgaacgcgcggaaaacgacaaacactactacatcgcgtacaaggacttcatcgatgaccccgaaaacaatcctcgtccttcggcaagcgggaagttcgagatatacagccagtcgaagcttgccaacatcgttgccgcttcgcggggcaatactgatgcgaagccctatccgacatatcgggttcccgtgcaggggtacgaaaccacgttcagcgactgggacaatcaggttaagggcgacctcccgtacctgtttttcactcctcattaccttcgccgtgcgcacacgaccctcaacaatgtgccatggttgcgcgaggcattcgaaaaccccgtgttcatcaactcatccgacgctgccgagaaaggcatcgagaccggtgatacggttttgatttggaatgatttcggcaaggttttgcgcagagcgagtgttttggagacgataatgcccggggttatagcgctgccccatggatcctgggttgatgtggacgaggagacggggatagaccatggcggtgcggaaaacgtattgtcgggcggcatttcgagcgatagctttgtttccggatacaacaattacaacgtgaattttgagaaatacgacggtgatccgcttgagcccgacgccctatggcctcagcgtatcatcgatgcggaatagggggaacatatgactcgtcagggtttctatttcgacaatcgcagatgcgtcggatgccgtacctgccaagttgcgtgcaaagacaaaaacgatcttgccgtcggcattctgtttcgccgcgttgactcgtatcaggtgggaacgtacccggatgcgatgctctaccactacgcctccacctgcaaccattgcgaggcgcctgagtgcgttgcggtttgcccgaatcaagctatgtacgttgatgaagaggacggaaccgttcagcatgatgacagcaagtgcattggctgccaatactgcgtaaacgcgtgtccgtatggcgttcctcagtatcttgaggacgtgcagctgacccataaatgcaatgcctgcatcgagcttcgatccaatggggagcaacccgcctgcgttgcagcatgcccgatgcgcgcgcttgagtttgggccgatcgacgagttgcgtgccgctcatcccgatgcggttgatgaaatcgccgttcttcccgattcggacaagacgcgtccctctttggcgataatgccgaaaggcgctgcactcgaggccgatccggtggcggtcatactgtagccgagcaaccatagccgcggctgggaaagcagccgcggctttcgtgaggagggaaaatggcaaacgataaaggatcgccatgctgcgcgcccgacacgggagaatctgtttcaacgcttgactccgatgtaagaatactgcttgcaaacagggtttttctataccattgcctatcgagggcgttcgttttcgagccggacggaacccttctcgatgccgtttcggataacgttgtcttaaaggaggcgtgctcgctgcttgacggggatggcgattgcggcgttgagctttggggattgataagcgatgccgcccgggctcgggggacgctcgatgagctgtgcggcgaatacacccgattgttcatcggtccgaacacgcctcccgttcctccgtgggagtcggttttcgtttcaaaagaggggctcctgtttcaggaaagcacccttgccgttcgcgaggcgtaccgctcccaaggatttcgtgcggctggttacccgcatgagccggatgatcatctggcaaccgagttgagcttcatggctgccctgtccgagcgtacggtgcaggctttcgaggaaggggacgtcgatcgatgcaaggagcttctttcttctcaggccgacttcctgcaaagccatctgctcgtctggattcgcgaattttccgatcgtatgaacgaggttgatggtataagctctttctatccctcgttcgcgtcgcttgccgccctggtgtgcgaacgcgatgccgaggttatcggggagctgtttgccgaactgtagtgggggatcatgggcaacgtcacgctgaaaacgaagttcgtcgtgctgatatcggcgctgatcgcggcgtctctgcttgcaaacctcgcgtggacgtcggtgaacaagcgtgcgcagatggaaaacgagctgcgggaaaagggcgaagtgctcgctcagcaaatggatgccatgtgggaattcatggcctcgaaccaggatcgcctcgagcagatatcctacacggaagacggaatttaccagggactccactgtgcgatcgtgggtcgcagcatcgggcttttgttcacgtcgcaatcggagtacgaaacgcgtttcgtgaacttcgatccgcgcaatgccgccgatgcgcccgacgaattcgaggcggccgcgctcaacgcgttcaaagaagaaggccttgccgaatactacgaggtaaccgaatacgaaggcgaagaggtgtttcgctatctggctcccatgacgatcgaagagaactgcctcgattgccatggtgagcctaaaggcgagatcgatgtgaccggatttccgaaggaaggctgggcgatcggggataacggcggtgccatcagcatcatcatgccacttgacgtgtatcgggaaaacgagcaatccgctatcgtgcaagatgtcatcttcttcggcggtatgctcgcgttctgcctcgtcgtcgtgtatgttgcgctcgggtatctcgtcacgcggccgctgaataaaatccaggccggcgttgaacagattcaaacgggaaaccttgacgtcgagcttgcctacaccgaatcgtcgcgcgagatgaacacgctgacggctgatttcaaccagatggcagaggagctttcggcgatttacggcaatctcgaaacgcaggtcgaagaccgtacagcgcagcttgctcgcgcaaacgacgttctcgagcgtcagcgtgcgcaactcgaagatgctaacgatcgcctgcgcgacgagaatcggtacaaatcggattttttggcgataatgagccatgagctgcgcaccccgctcacctccatcatcgcgttcgcggaaatgctgaacaaagagagcgatccgaaaaacgagaaggaagccgaaacgcgccgcgagatcgaggctaacagccgggcgctcttgttcatgatcaacgatattttggaaatgagccgtttggatgcgggcaggatagagatgaatgtggaaacggttgatttgggggatatcgccgggctggtgcagtcggtcgtgcaaccgctggccaagcaaaacggcatcgagttcacgtgtgaaatcgatgccgacgtgccgcttgtggaagcggatttcgagaagcttcgccatgtactcgaaaaccttgcgggcaatgcggtgaagttcacgccggaaggcggctctgtgcagttggccatcagctatcatcccgaatgcggggaagtgtggctcagggttgccgatacgggcatcggcattgcgaaaaaagaccagcagcgcgtgttcaaacgattcgtgcaagccgactcctcggcctcgcgcaagtacagcggcacgggtctcgggctggcgttggccaaggagtacaccgaaatgcacaacggcagcatatcggtggagagcgtgctcggcaaaggcagcgttttcaccgtgcgcataccggcgaaacgcagtgcttccgatgatgagggagatggagaataatggatccggcaaaggtgatgctcatcgatgacgacgagagccttcatgtgctcgtcaggcgtttggccgaggacgcaggatatgcgttctgctcggcctacgggggagatgagggactcaaggtccttgcgacggagaagcccgatcttcttttgctcgatgtgatgatgccgggaacgaacgggttcgacgtgtgccggaagatgcgcgaagacggtcggcgcatccccatcatcttcctttccgcaaaaggggatatcgtcgacaagagcatcggcttcaaggcgggcggcgacgactacgtggtgaagccgttcagttccgacgagcttctgctgcgcatggaggcgcatctgcggcgccataaatcggatctcgctttcgcgaaagccatcacgcgcgaagggagcaatgccaccggcgacatcgaggtgtgcttcaatcggtacgaggtgcggctgcgtggccagaaggtcgatttgactgcgaaggagttcgaaatcctcgcgcttctggctgcaagccccggccaggtgttcacccgcgcccagatatacgagcatatctggggagggggaagcgatgtcgatgagagcagcatcacggtgttcatccgcaagatccgagagaagatcgaggacaacccttcgcagcccaagtacctgcttaccgtatggcgcgtggggtacaagttcaccgaacgcgtatagcatttgcgcgaaagccgcttccccagcgctgcctgcgtcctttcggatacaaatctgcaacattatccgatcttacccctgagggaatcttgacggctggagttcggtacaatagagttatcaaaacattactaaaaagatcatcgaacggggtgcgaaccgggtgaacacgaaagaagcgctacagtcgttcgaccttgatccgcgcttgttttacgacgccgtggcgttcagcaccgacgactacctgtacgttatcgacatgaagaccgatcgggcgctcatctcggataacatgtatgcggatttcgatctgcccgactgtttgttcgaaggcctcatcccgttgtggcgcccgctcatcgccgagcgggatcggcagagcttcgacgaatccatcgatgccatgcttgccggcgtgaccgatgtccacgatatcgaataccaggtaaaaaaccgcaagggggagtacgtctgggtcgtgtgccgcgggcttatgcgcagggacgaagacggtcttccgaagatgttcgccggcgtcgttacgaaccttgagcgcaagggcaagatcgatccgacaacgggtttgttcatgcatgataaatgcttgcaggttctcgataggatgcttttgagcgaccgtgcgcaaggcggcgttctgctgctcggcctcgatgacttctcgcgcgtcaattctttgaacgatcatgctttcggcaacgttgtccttcgcgttttcgcgcagagcatccagcgcatgctgcccgacgacgcttcgatctttcgcttcgacggcgatgagttcgccatcgttttagatggggccgacaaatccgatatgaaggatctgtatcgcgctatccacgcttttgccaaccgccagcagaatatcgacggcatcgtctacttctgcacggtttcgggcggtatcgcaatggcgggcgaaggcgcatcgaacgggtccgatctgaccaaaaacgccgaaagcgcgcttgaggaaagcaagcatcgaggaaagaacaccatgacgttcttctctcccgacatgaccgagtctaagctgagacggcttgagctcagcgatcggctgcaagcttccgtcctcaacggcatgcgcggcttttcggttcattaccagccgctcgtcaacgcggatacgatgcgcatcggaggcgccgaggcgctgcttcggtgggatgcgggggatctcggtccggtgggccccgacgagttcgttcccgttttggagtcatacgggctcatcagccaggtaggccggtgggttcttgatcaggcgcttgtccgatgcgccgaatggagcggctctcatcctggtttcgtcatgaacgtcaacatctcgtatctgcagctcttcgagcccgatttcatcggtttcgttcaggatgcgcttgctcggacgggagtcgatccgtcccagcttgttctcgagatgacggaaagctactttgtgacggatctcgatgcgctcaagacggtcttcagtcggttgcgcgatcttggaatccgtcttgccatggatgatttcggaacggggtattcgtcgcttggaatgctttcgcaatctcctgcagacatcgtgaagatcgatcgcgccttcatcaggaacatcgatgcggaggcgttcaaccgctcgttcatcgatgccgtcatcgatctgtgccatagcgtgggcatcgaagtgacggttgaaggcgtcgaagaggctcccgagcttgacaccgtgcgcaccatcggcgccgactgcattcaggggtttctcgtatcgaagccggttacggccgatgatttcgaaaagcggtttctggcgtagccgcagtgcgcgaacgaagcggcttgcgggcgggccgaacggatttggggtttgcgagcgcgccgggcgggctgcgccggccctgtcacttcgattgcagcaactcgatcaggtcttccctggagaggttcccgagcgaaacggtttcgtctgctccgatgatctgatcggcaagttcgcttttcgcctcctggagcctgactatgcgctcttcgatagtatcctttgcgatgatcttgtacacgctgaccatctttgtctggccgattcgatgggcgcgatcggttgcttgggtttgcgcagccgaattccaccagggatcggcgtggatgacgacggatgcccctgtgaggttgagacccgtcccccctgctttgagcgacatgaggaacaccggggtatcgtcctcgttgaatgcgttcacgagctcgaggcgctttttcttcgcagttgcccccgtgagggtgtagtaggggacgccctgattgtcgagccgctgcgcaacgagcgcgagaaaactggtgaactgcgagaagacgagcaccttttcgcctgcatcgatcgcggaatcgatgagttcggcaagcgtgtcgagcttggcggccccgccttcgtagttctcgtacagcagatgcgggtcgcagcacagttggcgcagcttcgtcagttcggcgagcacctcgaccttcttctcgttgaagctcttatccttgcggttcttgcgctgctcggtcagcgaatcgcgcagatgctgttcacttgcgacgtagagacgccgttgctcgccttcgagttgcgcatacaccaccgattcgagcttgtcgggcaaatcggcaagcacgttttccttgagcctgcgcagcatgaacggaccgacgagtgcctgcagcctgcgcgcggcatcttcgtcgccgcccatgatggacagctcgaagcgctcgcggaagcgcatgtaggagcccagcaggcccggcatgaggaaatcgaagatgctccatagctcgctcagcctgttttccatgggggtgcccgtcagtgcgaagcgattccgtgctttgatccgcttgacgctgcgcgtcgtgagcgtggcgtggtttttgatgtagtgcgcttcgtcgagcgcgcagcagaagaactcgcagcgttcgtaatcgtccgaatcgatgcggagcagatcgtaggaggtgacgagtacgtcgtagctgctcgcatcgtttctcaggcgcgcccgctcccgcttcgttcccgcaacggcgcacacccggagctcgggtgcgaaccgttcgaattccgccatccagttgtacacgagcgatgcagggcatacgatgaggctcggtccgatggctttcgcctcggctcgtcgggcgagcagcagcgaaataagctggatcgattttcccagccccatctcgtcggccaggatgccgccgaacccgctatcgacgagcatgttcagccagcggaacccttccgcctgatatgcccggagcgttttttcgagcgcagcgggcacggcgtatctgccggggtcggggttgcgaaaattgtcgatgtagcgggaaaacgtttcgtccctgcgggcgtcttcgagttcttcatcgaggtagaacgcgcggaaagagggcagctcgacggttccgtgtgcgagctgcttgccggttatgctcaggtcggaaacgatgcggtcgagttctgcgaggtcgtaatcttccatatccacgaaggcgccgtttttcaggcgatggtagcgtttgcgtttcctgtagcttgcaagcagggcgccgagctcttcggacgggaggtcttcggatgacacgagtaggttgatcaggtttcccgcaagtgaaagcccgaacgagatgcggggcttgcgatcgacgagcatccggtcgaatgcgggcgtcgtgaacacggtgccgagggcttggaattcagctagcccgtcgaacagaaggcgcgcgactgattcctcgtcttcgaggggaatgcgttgacctgggcctttgaagtagcggttcgcggctctgacgccggctgtctcgagcaggtcgtcgcgcagcggtcccggaagggcgctctgcgaatctgtctgcgcatcatctgcgaaaaggtcgtagtgccgcgcgtcgtagacggctttcgcttcgcaggtaaccgctttgtcgtctttgtcgaagtagaattccaggcggcagggaacgggacggtaggcatcgatttcggcgggtgcctgaacgtgcaggtgattttcgatcgacggcagcacggtggcgcagaacagcggcatgtcggcggcgttgacgaacagcctgtcgtcgtcgctgtcgtagacattgcgcaggaaatcggcgcaacgtgcgaacccgggcgagcagcggaagagggcgtcgccctgccaaaggtacatgcggtcaccgtgtgcggcgaacgggatcgtgctgtcgcggacgatcgcgtagccgtccgcacccaccttgttgagcttgatgtcgatgtcgggatcggcgtgtacgatgctcgcctgcgcgatcgaccgtacgccgtagtcggttccttctatgcggaagacggttccgtcaagcagatcggcgagctcgatgagctcggcatcggaaagctcgagatcgcgccccgtatcgtcgcggccacggtagcgccacgaggccgcaccgttggcatggctgcgcactgaaaccgctttgtcgagaaacgcggcgattgtccgccccctatcggtcagcattgcgggcgcgtgggtgaattcgagcttcttgccgtaggcgaagcgctctcctttccgcatacggccgacgaattcggaaatgctcttcatgacgtaggatccgttggggccggaaaccttgaaatgagcggtccagcggttgtatccgtagccgagcgtggcttcgatatcgatgaaccccgcctcctcggatgctgaaacctgccggctgcgctccatgaacgcggcgatgctcgtggaggtggtttgcgccgtcgggcgcttttcggtgaaaccgaggaatcgttcggggtggtcgttgtaggagagcacgagcgcggcgcaatgtttgcacatgccgtcgtaggaggccatggcggggcaggtgcaggagtaatcgagtatgcaatcgtcctcttcgtcgaagatgacggaggtgcggtaacgttcgttccacccgctgctccctacgaaaaacgcgctcaacgccgtttccgattcgtcgtagcggcactgcttggtgaggatgcttctatccgaggctgcgatcttgagggcgcgctggtacgtgcgcggatagcacaagcggccgatctcttcctctgaaatcatgcggtcctttccgtctggaacatgcaacaagccgaaccgcttttcgccaatcgaacggttcggcttgcatcgcagattgcttttcgcctatgccccgagcagcttttccacgctggcgagctttacgcagcagacgaacacgtccatggccgcttcgagctcttcgagcgggggcaaggtgggggcgatgcggatgttgctgtctttcgggtcgtttttgtacggatacgtggcaccggcgccggtcatgaccacgcctgcctccttggccaggccgacgatgcgctttgcggttccttcgggcgcatcgaacgagacgaagtagccgccgcgcgggttgctccatgtgccgcagcccgtttctccgaggcccgcttcaagcttttggcagacaagctcgaatttcgggcgcacgatggcggcgtgcttcgccatgtggcgagcgaggccgtcggcatcgtgcaggaagcggacgtggcgcagctggttgagcttgtcgtgcccgatggtctgaacgcccatgcgcgccttgatctcggcgatgttttcggggcttgcggccatggcggagatgcccgcgccggggaaggtgaccttcgaggtggatgcgaacttgaagtagcggtgtgcgttgcccgcctcgatgcacgcatcgccgatgtccatgaggtggtcctgctctgcggcatcctcgtagagatgatgcacgcagtaggcgttgtcccagaatatacggaaatcttcggctgcgcattccatttcggcgaggcgcgtgacgacttcgtcggagtaggtgacgccgccagggttcgagtacttcggcacgcaccagatgcccttgatcgattcgtcttgggcgacgaggcgctccacctcgtccatgtcggggccgtcggcgagcatgggcacgttgatcatttcgatgccgaacgcctcggtcacgccgaaatggcggtcgtagccaggtacggggcagatccatttgacggtgtcgagcttgcaccacggcgtcgagccgagcgtgccgaacatccagcagcgggcgacggcgtcgtacatgatgttcaggctcgcgttgccgaagattatgacgttttccgcctcgtcgtcgagcatcgaagccatgaaccgtttcgcttcgggcagcccgtcgactacgccgtagttgcggcagtcggttccgtcttcgcttttgaaatcggcatcggaggcgatgatgtcgagcatcggcatactcagatcgagttgggctgcggcaggctttccccgtgccatgttgagcttgagctctttggctttgaatcctgcgtactcttcttcaagctgcctgcgcagctcctcaagttcgcccgtcgataagtctgcataagtcggcattgtgtttcctttcaccgtctcgcccgatagatgcatcaaaaagaaggaggatactccattgagataaagtataatcccaccgtattgttcattataggggaagaagcgaatacatggtttccaacgatttctgggtattgctcgccatgctcatctacttcatcgtcgtggtcgtcatcggctttgtgtacgcaaagaagtcgaacgcctcgtccgagaattattttctcggcggtcgcagtctcggcccatggcttacggctctgtcggcggaggcgtccgatatgtcgggatggctgctcatgggtttgcccggtgtggcgtatttcaccggcgcatccgatgccatgtggacggctatcggtttggctctcggcacgtatctgaactggaaaatcgtggcaaggcgcctgcgcaagtactcggaagtggccaacaactctatcacgttgcccgatttcttctcgaaccgctttcatgacaagaagaacatcctgatgacaatcgctgcgattatcatcctgttgttcttctgcatttacgtgggcagctgctttgttacgtgcggcaagctgttctcgacgctgttcgggctcgactacgcaaccatgatggttctgggtgcgctcatcgtgttcctctacacgttcgtgggcggttacctttcggtttgcacgaccgatcttgtgcagggcatgctcatggtcacggcgctcgtggtcgtattcgtgggcagcgttacggctgccggcggcgtggacaacacggtggcgttcctgcagggcatccccgggttcttgagcggcactcatatggctgcccccgtgctcgattccgccgggcagcagatcgttgaagaggggatgcccctgttcggtgctccgaacgagtacggccttgtcacgatcatctcgggcctcgtgtggggcctcggctacttcggcatgccgcaggttctcgtgcgcttcatgagcgtgcgccattccgacgagatcaagaaatcgcgtatcatcgcgacggtctgggttgtggtttcgctgagcgccgccgttctcatcggccttatcggccgcgcggtcatcccgaccgagtttcttacgcagtcggcagccgaaaacgtgttcatcgtgttgtcgcagatgcttctgccggcgttcttctgcggccttgtcgtgtcgggcatcttcgccgcatcgatgagctcatcgtcttcgtacctgctcatttcgggctcggccgttgcaaccaatatcttcaagggcctcatcaagaaggatgcgaccgatcgccaggttatgatcgtcgcgcgtctgacgctcgtggtcgtgcttctgttcggcatcgtgatcgccctcgacgagaactcgtcgatcttcagcgtcgtgtcgtacgcgtgggccgggttcggcgcgtcgttcggtccgcttatgctcatgagcctgtactggcgtcgcacgaatctgcccggagctgttgcgggcatggtggtgggtgcggttaccgtgctcgtatggaacgcgtttatcaagccccttggcggatggttcggcatctacgagctgtttccggcgttcgtactcggcctgctggctatcatcgtggtgtctctggcaaccaaggagccttcgaaagaggttaccgacgagttcgacagctacttggaggccgacgtttaggcatcgatttgcctgacgtctcaaaggcggctgcggcgatggtgccgtggccgctttttgcatgttcgggtggggttttcggggcgtgcagcattgcgcgaaacagcttcctcgcgcgaaatgacctcaaaatggcggtcaaggcaagcttctgtcgccatttggagtcgtcgatggccgtttgcagcgccgcttgagttcagtcacgagcgtttcccctggtcgcgaaaataaaataagttacctaccggatgaaaacttgacagaagcttgccttggctgccattttcggcatgtttttcacaagggaggttcttatatatctctcatcggctttgcagcggcgaatggagcgcgcatgtcgggcatccttagccgtcatcgacggagccgggcgcgggtcgggtatggacgatcggggggcggcgaaccgcgtgatcgaggggcttctcgactcgctctggaaagaaatcgcggttcgtggtcgtatatttctgcaagaggaggctccagttcgtcctgcgggtagcctagaacgaacgttcgtgcgatactatgttttcacggaatcagggcactgggaagaaagcgatgcggccatggaagcagcgaacagttcgaatacggaggaaggtacggctgcggaaggcgagcgggtcgtctcgggccatccgtcctcgtcgtcggatgcccttgcggctgcttcgggctccgctcgcaacgcatcgtcgggcactctcgcagctgatgcgggtgccgtacacattgcatcgcaacaagccgcaggcgcgaatgtttccgtactcgcacgcttttccgatggggtgcgcggatggtttctcgatacgttcccggcgccgacgcctttgcaggagcgtgcttgggaagttgtcgcgcggaaagagaacgcgctcgtcatcgctccgactggatcgggtaagacgctcgcggcgtttttgttcgcgatcgacgcgctcatgcgggagagggcggcctttccagaggtaggtgcgggagggggaaccggtgccgagggcggtgcggggtcggaagtcggtgcgagggatgcagccgccgcgggcggcgcggagttcgaggaggctgcggggggtgcagccgccgacgccgttgcgaagccggaaaaagccgcaggaggcaagcgggcgaaaagcgcttcgttgcccgtgaagggcgtgcgcgtgctttacgtttcgccgctgaaggcgctcggggccgatgtcgagcgcaatttgcaggagccgctcgcgggcattgcgcagcgcatcgcgcaggcgggggcggccatgccgtctgtgcgcaccggcatgcgtaccggcgatacgacgcccgaagagcgtcgggctctcgtgcgcaatcctcccgacatcctcatcaccacgcctgaatcgctttacctcatgctcacctcgaaagctcgggaaacgttgcgcacggtggatacggtcatcgtcgacgaagtgcatgcaatggcgggcgacaagcgcggcgcgcacctcgccctgagtctcgagcgtctcgacagcctgctcgaaaaccctgcgcagcgcatcggcttgtccgccacggtgcgtccacccgaagagatcgcgcgttttctcggaggcgttcgtcccgtgagcatcgtcgcgtcgcaagataggcccgacatggatgtgcgggtgagcgttcccgtgcaggatatgacggcggtgccttcgttcagcggcttcgagcccgacaagctggtatcgtctgcggcggaatcgcgtcggacgggcggcggtccccggcgcgcgcccgccgagcaggcctggaaatcggatcgggcgctgcgggctgtcatggatggccgcgcgccgaaagcggcaacgcccgatagtcgagtggggtcatcttccatctggccttacgtcgaagcggccattctcgacgaggtgcttgcgcatcgcaccaccatcgtgttcgtgaattcgcgcggtttgtgcgaaaagctcacctcgcgtctcaacgagctttacgcgaagcgcaaaggcgcctttcccgaggggggcgaagccgttgcgagtggcattcggtcggggatgggcgctacaaccgatttggcccaggcaacggccgaagtcattgcgaaagcccatcatgggtcggtatccaaggagcgccgacagcaggtcgaacgcgagctcaaggccggcgaactgccgtgcgtcgtggccacgtcgagtctcgagcttggcatcgacatgggatcgatcgacctcgtgctgcaagtggcgccgccgccttcggtggcgagcggcctgcagcgcatcggccgtgcgaaccatcaggtcggcggcagatcggaaggcatcgtgtacccgcgcacgcgcaccgaggtcatcgacgccgccgtcgtgtcggagggcatgtcggcgggagccatcgaaaagacgacggttgtcaaaaacccgctcgatgtgctcgctcagcaaacggtcgctgcggtgtcgatggaggatgtctctcccgacgagtggtatgcgacggtatgccgctgcgctccgttttccgatcttccgcgccgtgcgttcgatgccgtgctcggcatgttgagcggcgcgtactcgtccgctgaacttgccgatttctcgccgcgcatcatctgggatcgcgagcgcaacctgctcattgcccgcccaggctctcagcgccaagcggttaccgcggcgggcaccattcccgatcgcggcatgttctccgttgtgctgcccgaggccgatgccaaggcgggcaggcggcgcgtgggcgagcttgatgaggagatggtctacgaatcgcgggtgggcgacatcatcgcgctcggtacgagcacgtggcgcatccgcgaaatcacgcgcgaccgcgttatcgtggaaccggcaccgggacgttcggctcgcttgccgttctggcatggcgaaggcattgggcggcctgccgaaacgggaagggcgaaaggcgcgttcgtccgtgcggtcgcttcggcgctcgatgcgcccgacgaagacgagggcgatgacgccgagggcgtttgcggcggcgtcgagccggggatgctggcccgtctttgcgctgatggcctcgacgagaacgcgcggcgaaaccttatcgagctcatcggcgcccagcgtgccgctacgggctttgttcccgacgatcggacgcttgtcgtcgaacgttgcgaggacgagcagggcgattggagggtcatgctccattcgccctacgggcgccgcgtccacgagccgtgggcgatggcggtgaccgatcgcatcgtgcgaacccgcgggttcgatccccagacgcttgcgatggacgatggcatcatcttgcgcattccgatgagcgaaaccctgctgcccggtgccgagctgttcgcgttcgatccgagcgagctagaacgcgtcgtgcgcgatcgggtggattcgacttcgctgttcgcggctcggttccgcgaatgcgcggcgcgatcgctgctcatgtcgtcgaccgctccgggcaagcgggcgcctttatggcagcagcgtctgcgtgcgggccagctcctcgaggcggctcggcgcgaaggggattttcctctgcttgccgaaactgcgcgcgagtgcttgcaggatgtctacgacatggagtcccttctcgccctcatggacgatattcaggcgggggcggttcggcttgtcgaagcgcagacttcgacgccttcgccgttcgccgcgccgctcctgttcggttacgtaggcgatcatctctatgacggcgatcttccgaatgccgaaagaaaggcatcgcttctgtcgctcgaccccacgttgctgggtgagcttttgggctccgacgaggtaggcggacttatcgatcccgaggtggttcgaacggtcgaatcgcagttgcagcgcctcgcttccgaccggcgcgtgcggggcgtcgagggcgtagccgacctgctccgcgctttgggcccgcttacggttggcgaggtggccgaacgactgaggcgagatggcggatgcgacgaggatgccgcaggcggatcatcctgcgcgtttggagaagcccaggcgctgctcgatgagctggcgcgttcgcatcgtgcattcgttgcgactatcggcggcgccagccggtgggcctcctttgatgacgcacgccttcttcgcgacgcgctcggcaccgatgctcctgggtggacggcctcttcggagctggccgagccgtcggggggctcgcccggcagataccacccgctcgatgagctgctggctcgtttcgcacgcacgcacggccccttcgccaccgcggatgccgcggcggctttcggaatcggctgtgcggttgcccgcgacgggctcgaacgccttgcggccgaaggccggatcgtgcagggtcgcttcaagagcgaagacggtgggacggcggatgccgaaggcgaggtgcgacaatgggtttcggccgatgtgttcaagcggctgcgatcgctttctcttgccaaggcgcgcaaagccgttcgccccgtcggcagcgatgcgtacgtgcgctttctgcttgatctgcagggtgcgggctcgttcggccgagggcgtttcgagggcgttgagggcgtggcgcacgttctctcgcagttcgagggggtgtatctgcccgcgactctgtgggaatcggtggttctgccgagccgcgtgcgcgattaccgcccttcgatgctcgacgagctgatcgcatcgggcgaggtcatgtgggtgggaggtcatcgggatgaatcgatcgatgccgatcccggccacgggaaagcccgctcttcaacggccggggccgacttcggatctcgcaaccgcacttcgtccgcttcgtccgcggcagcggggctcatcgcgttttatccgaccgattcgcccttcgcgcccttgcagcccgatgccgaagacggcgtattcgaatccgcggtttcggaatcgggcgattcccggttggcgggcgatcgtttcggcgatggcgcgcaggaagcagacagcgcgtcgatggggacggcgatcgtcgaagctctggggtttgggggaggtctgttcttccgccagatcgtcgacgccgtccgacgcaggcttgcttccgttcgcgttgacgaggattccgtcgcctcgatgctgcagcggctcatgtggcagggacgcgttacaaacgatacgttcgcaccggtgcgaaccgtggcgtcagccgaatcggcaccccgcgcccgcagcgcgagccgccgccgcgtcagcagccgtcgggcacgtgcgcgcgccgattactccgaggcgatggggaagtcgtctttcgggaatgtaagggccgtgcaatcggggcgctggtcgcttgtttccccttcggacgaaaacgataccgtgcgcgccatcgcgctcgtcgattcgctgctcgaccgctacggcgtgctcacgagggatatcgctcttgcggccggcgtctccggcggccttggctctctcatgcccgtcctcagatcgatggaggatgcgggcgatcttctgcgcggcatgttcgtcgaggggctgggtcctgctcagttcgctgcgcgcgaaacggtcgatgcgctgcgcgcttacgccggaaacgatgatccgggcgccgatcgccgtaccgcgatggcagtgttggccgcagacgatccggcgagtctctttggggcggggatcgcctggccgccggtcggcggcttttccggcgcggatgcgaaagccgtcgccggcggggttgacgctcggggaggttcggacggttcccgcatgctcgatgatgccgggaccgatgcatccgatgctgccgaaaagactgtcagcgaggattcttgcgagggttcatccggtcgatctttgcggccttcgcgccgttcgggaagtcttgtcgtgatacatcgcggtacgccggtcctttacgccgctcccagccttcgatcgatcatcgcgttttccgatgatcttgccgtcctcgccgatgccgcatgcgctctcgtcgagcatgtgcagaaatccctcaagcgagagggcggggcgggtgctcgaaagaagatgctggtggaggaattcaatggccgttcggttctcgacacgccgtttgccgccatcttgcagcacgaaggtttcgtgcgcctgcccgacggaatgcgcttctacgcttcgccgttttgacgaatggcgcatcggttcggtctcagcgtttatcggccggtgcggtccgatcggcaaaggcgagcgcgtctttgatcggctggtaggctgcaacgaggtcgtccaggcgcatctttgcgtttgccgggctcgtggaaggaagggcttcgtgcggcacctgctcgagcatctctttgttgaagcggcggtagagcgcggctgctttcgctcccgtggtgaacaccgcctcgaggggcgcttcgtcgaagatgatcgaaaggtcgttgggagtgggatcggcgatgcttgcatccgatgcgccttcgatcgtgcaggatgcgagaacgtcccagatcgcgatgcgatgggcgagcaaaaacgccgttcgctcctcgctggtgacgggctccggctcgttgaagagcgcgccgagcaccttccagaagcggttctgcggatgcccgtaatagaaaccgacttcgcgggatgcgggggagggcatggtgcccaaaacgagtacgcgggagttcgcgtcgaaaatgggttgcaaggggtgtgcgatgatgcgcggcttttccatctgtcctcccgtggatggctcggtgcgtttcgatcgggggcaaaggacccgatgctcggtgacaggctgcagcgctacagggcgcttccggcggcagaacctgcctcggcgtgaatcatctgcttaggcatgatcttcctcctcgtagacgaagatgtcttctatgggcagttcgaagtagcgggatatcttgaacgcgagcgtgatggaggggttgtagcgccccttctcaagcgagctgatggtttggcgggtaacttccagcgcatcggccaatgcctcctggttcagcccgcgctcgcggcgcagcgcttcgacacggtttttcacgagcgtcctccgaaaatgattcctgcataaatgtaaagctaactttacatcaacgataccatagcaaaacaaagatgtaaagctgactttacatatccgcgcttccgcctgccgcttggcagatggaagcgaggttcaagctcggctcgtcacttcgagaacggctttctcgagcacgtgcccttgtatggcgcgcctgaactcgttgaggtaatacccctcttcaagttcgagttcgatatcgagtgcgtaaacggtcaacgtatatgcgtggtctttgtcgggtggataggggccggcgtagcgatggatgatgcgcgggtcggtccagccgcccgcgagcggcgaccaatcgctgttcgatccttggatgcagggcacggcgcccgatgcgcttgcgttttcgggaatcgtgcggatgtcgggcgggaaattgcaggcgagccaatggatccagcaaaagccgcctacggggatcgcgtcgaaatcgacgaacgtcaacgcaaggctctttgcggtgtcgggaacgtcctcgacggataggggaaacgatacggcgggatgcccctcgatttgatgctcggcaggggcgtgttttccgtatttgtcgggcagcatgcccccctcaaggggaacggaaatcttcatcggagctcctctcttctgtcgtatgcctagcgcgccccgcgcctcgcagttgcggtccccggttgccgagatggggttgcgggcgcgtgcggtatgcgcggtaccccaattgtataccctggatcaaaatcccaacatgccgttgcgttcgaagggcccgccgcgatccccctaacgcgcctgtgcttcgggggggaggagcagcgctttctcggcgttctcctcgctctgtcaacggatcgcgacatttttccaatgatatgccatgatcggttggtggagcgccttctggcgccgcactatcatggatgcatgaaggagtatgaaaaacatgatcggtatgaatatccagagcaggcggaagatgtgcgggctcacacaggaacagcttgccgagtgcctgggcgtatcccgccagactgtggcgaagtgggaaagcggcgaaacgacgcccgatttatcgaacggcgccgccctggcggatgctctcgatgtttcgctcgacgcgctcatccgctacgactcgcacggcacgtcgcttcccatgccgccgcgcggaaagcacctgttcggaacggtaaccgtgggcgggcgcggtcaaatcgtcataccgaagcaggcgcgcgataccttcggtatcgagccaggcgattctcttctggtattcggcgacgaagcgcaggggatcgcgataacgaaggcggaagatttcatggatcgcgtttcggcgctcctcgagcaatcagggaaaaaacggtaacggcacggctgccgagctgggttctgcatgccgtcgcccgaaaggagatgccatgcggaaagcaggcgggaaaaggaaggtcggcatgatcattggaatcgcggttgcgctcgtcgtcgcgggagtggcggtggccgtagccctgtacgtcgacaacaacaggcacggtgaggcccgcatgatagagaaagcgcatgcggcgggcttcgaggagaagcaggttgacgttggcggggcggtcgtgaactatgcggaggggccggcgggcgggcctgcgcttctgctgatccatgggcagtcgatgcagtgggaggattatgcgagcgtgcttccgtgccttgccgagcgctatcatgtttacgccgtcgattgcttcggccacggcgaatcgactcgcgatccgtctctttacacatgcgcggcgcagggcgaggcgctcgtgtctttcgccgaccaggtgatcgatgccccctacgaggtgtcggggctttcatcgggcggcatcatcgcggcgtgggttgccgccaacgatgccgagcgcgttacgtcgctcgtgctcgaagacccgccgtttttccatgtgacgcccgaggagatgcaacgggagccgggctgtttcgtgtggcgggacgggttcgagatcacgcacgggtttcttcagcaaagcgaagtgggcgatcttgccgtgcattacgcgcagaacagctatctgttcgcgcaattcggaggattgcagccgcggattgccgagtggacggccgcggagcgcgcagctaacccaaacgagcacctggtgctgtcgtgggtgccgcatgactgggtgcgcggcatgtactattacgacgatttcgatccgcgcttcagcgaagcgttttatcaggggacctggcttgaagacgacgcccaggaggaaatgcttgcagccgtcgaatgtccgacgatctacctcaaagccgagacgcgctacggtgcagacggccttctgtatgcggctaacagcgacgaggatgcgctgcgagttgaggagctgctggcggattgcaaaaccgttcgcatcgaatcggggcacgatattcactacgagcaccccgatgccttcgtcgatgccgtcgatcgggcgcaggcgcgagccgcgggaggcggggattgaccgcctcccgcgtcgggcggcgtgaaggcctgtggcgcccgagtcgccttcgcgatcgcccatgcccgtatcggctatggaaaaatcgctgaaattggggtctttttaaatctcatccgacgtattatcatatcccgcgggcaaattcaggtttgcccgaatgatgcgcaaacattcgtcgtttcgcctttcttcgccccatacgggcgggaggaagtctcagaaacggaggaatggtggagatacacccgggggcgtgtaaaccgttgacaccccgcttttcctagcgtattattcatctgctcgcgcgatcgcgccttagcgaaagcgcaagcaggcagcttgataaatacacatgagttgagcagacatttgggagtgtgcccgagtggttaaaggggacgggctgtaaacccgttagctatgcttacctaggttcgaatcctagcgctcccaccatctgcctgtgtagctcagtcggtagagcacttcgttggtaacgaagaggtcaccggttcaagtccggtcgcaggctccactaatggcggtgtagctcagttggtcagagcacacggttcatacccgtggcgtcactggttcaaatccagtcaccgctaccattttggaattcacacgaacgaacggttcgtgcttacgtcgcatgtgccacaaggtgcatgcgctttttttacttgcaagaaattgcactcagcttagaaagcgtccgagagggcgcagaagctcatcatttatctctatcgcgaaagcgagcctattttaggaggatgacaatggctaaggagaagttcgagcgcagcaagccgcatgttaacatcggtactatcggccacgttgaccacggcaagaccacgctcaccgctgctatttccaagaccctgtccagcaacgacggttcccatggcaccgcttctgctgacttcacggccttcgaagacatcgacaaggcccccgaagagcgcgagcgcggcatcaccatctcgatcgctcacatcgagtacgagacggacgctcgccactacgctcacgttgactgccccggccacgccgactacgtcaagaacatgatcaccggtgctgctcagatggacggcgcgatcctcgttatcgctgctaccgacggcccgatggctcagacccgcgagcacatcctgctcgcccgtcaggttggcgttccctacatcgtcgtgttcctgaacaagtgcgacatggtcgacgacgaagagctcctcgagctcgtcgagatggaagttcgcgagcttctcgacagctacgagttcccgggcgacgacaccccgatcatccgcggttctgctctcaaggctctcgagggcgaagcggaatggcagcagaagatctgggatctcatggatgcagtcgattcctacatcccgacccccgagcgcgacgtcgacaagccgttcctgatggctgtcgaggacaccatgaccatcaccggccgcggcaccgttgccaccggccgtgttgagcgcggtaccctccatgtcaacgacaacctcgaaatcatcggcatcaaagagaccatgaccacggtttgcaccggcatcgagatgttccgcaaactgctcgacgaggctcaggccggcgacaacatcggttgcctgctccgcggcgtcaagcgcgaggagatcgttcgcggccaggttctctgcaagccgggcagcgtgaccccgcacaccgagttcgaaggccaggtttacatcctgaccaaggaagaaggtggccgtcacaccccgttcttcgatggttatcgtccgcagttctacttccgcaccaccgacgtcactggtgttgcccaccttccggagggcaccgaaatggttatgcctggcgacaacgtgctgctgaagggcgagctcattcacccgatcgccatggaagagggccttcgcttcgctattcgcgagggtggccgcaccgttggctccggccgcgttaccaagatcatcaagtaacaacgctcgactgatcgaatgcttgaaacggagcccgtgtaccatgcgggctccgtatgcaaatcgcttatcatgtgtatgaatcgaagcgcgaaacgttacaataaaaggagaattcatgcgtacattggtcacattggcgtgcactgattgcaagcgccgcaattacacgaccaagaagaacaagcagaataatcctgatcgcatcgagatgaagaagtactgcaagtggtgcggccatcatacgctgcacaaggaaactcggtaagtagtcagggaaaagcattaggccagtagctccaattggtagagcggcggtctccaaaaccgcatgttgggggttcgagtccctcctggcctgccagcttgtttattaaagcagcttggttcgaagttgcttgggaagcagcttgggaacaggctgctgatcgataccgatatggttggtcgagcagtcttatgataggctgcttgtttggcgttataagacggtaagaattccgtcgcgaataaaggatgcagatggctaagaaatcaaagacacagcgagcgaaagcatcggctgcccgtgctgctaaaaaagagcaggaggctgtcgagagcgcgcaggttgaggctaaagacgtagccgaggccaatgcggaagctgagaaaaagccaaagctgaagctcttcaagaaagccgagaaggccgaggctcctgcagagaagaagcaggtcaaaaaagaagagaagaagtcggaaaagaaggcgaagaagccgggtttcttgagcgaggttcgcgctgagatgaagcgcgttacttggccgacgaagtccgacgtgctccgttggagcggcgtcgtcatcgtggctcttctgttcttcggcatctatgtttcggtgctcgataacttcatcgtaacgccagtgctcattggcatatcgggtttgggagtgtaatcgaatgtcgaaaaaatggtatgtccttcatacgtattcgggatacgagaacaaggtgaagaagaatctcgagacccgcattgaaacgatgggtcttgagaacaacgtcttcggcatcgaaatccccactgaaatggtcaccgaaatcaaagaaggcggccgtcgtgtggagaacgagaagaaggtttttccagggtacgtcctcgtccgcatggagcttgacgatcgcagctgggctgccgttcgcaacacgccgggcgtgacgggttttgtgggcagccagggaaaccctgcgccgttgacgcgcgaggaatacaacaagatcatgaaacggacgagccgtgaggctccgaagaagacttcttccagtctcgaagtggggcaggccgtcaaggttgtctccggtcctctggccgagttcgacggcgttgtttcggaagtgtctcccgaagcaggcaaggtcaaggtcatggtctcgatcttcggacgcgaaacccctgtcgagctttcgttcgatcaggtggcgaaaatttagaattggatatcatgagcgccgcgtgcctgggtggacagggcttctcacgcaaggcgctttgttgatagattgagattgagtaaacatcagctgaaaggaacgtttcgatcatggctgaaaagaaagcaaccggctttatcaagcttcagatccccgctggtgccgcaaacccggctcctccggtcggccccgcgctcggtgcgcagggcgttaacatcatgcagttctgccaggcgttcaacgccgagacgcaggacaaggcgggaaccatcatccccgtcgagattaccgtttacgaggataagacgttctcgttcgtcaccaaaaccccgcccgctgccgtccttatcaaggaaaagctcggcattcagagcggctcgggcgttccgcagctccagaaggtgggcacgctcaccgaggatcagcttcgcgagatcgccgaggtgaaaatgcccgacctcaacgccaacacgatcgaggctgcgatggagatcatcgccggcaccgctcgcagcatgggcgtgtcgatcgagggccgcgctccgaagaagacctatgtgccttccaagaagctcgccgccatgctggccggcaggacgctcgacgaggagtaaaccgcaccgaggccgcgcgcctctgagcgaaagacagatgtggaagagcgcatgcccgctcgtcatcaccacgaaaggacgatgaaatggctaagaaatccaagaactaccgtgcagcagtcgagaaagtagggagcggtccttacgctccgctcgaagccgtcaagctcgtgcagaaaatctcgaccgcgaaattcgacgagaccgtcgaagctcatttccgcttgggcatcgatacgcgtcaggctgaccagcagctccgcggcacggtgagcctgcccaacggttcgggcaagaccgttcgcgtggccgtgttcgccgaaggcgacgccgcccgtgcagccgaagaggccggtgccgatatcgttggttccgacgatctgatcgccgatatccaggctggcaacatcaacttcgatgcgacggttgccactcccgaccagatggccaaagtcggccgtctcggcaagattctcggtacgcgcggacttatgccgaacccgaagctcggcaccgtcacgaacgatgtggcaaaggccatcaaagagctcaagggaggccgtgtcgagtaccgcgccgaccgttacggcatcgcccatgtcatcatcggcaaagtgagcttcacgcccgagcagcttgcagaaaactacggagccgtctttgacgagatcatccgtatgaagcctgctgccgccaagggcaagtatgtcaagtccgtcaccgtcacttcgacgatggggcctggcgttccggtcgacagctcggtgacccgcaactacaccgttgcagctgagtaaactcaatcacaatcgtcacatacgtgcgaggagaggagccttcgggctcctttcttttttgatctcaatgtgatatcatcttaatatcaagttagaacaaagcggcatatcatgattgccgaagtgcggaccgcgcatgcggatgccgctttgaggccttcggcgggattccgacgaaggaggccgcgatataaggagtggtgcagcatgtctgaagagaagatcgtccaaggcagaagcggctggccgatgcttgcgttgaccctggcggtggccgcgttgtgcgtggtcgccatcgttttcggcgcaatgatgctgccgcccgaagaagctcccgtgacaaacgggatgcaggtgctcggcatcatcctcttggtggtcggcatcgtcgttttatgcgtagggcccctgctcatgctcatgggtttctacaccatccagcctaatcaggctcgcgtgctcattcttttcggcgattacttgggaacggtgcgcgacgaagggttccattgggccaatccgtttctttcccgctcggcgggcacgacggtttcggaggagggcaaggcggttccgcgatcgcttaagatctctttgcgcgcccgcacctacaacggcgagcatttgaaagtcaacgataagaacggcaatccgatcgagatagccgatgtggtggtatggcgcgtcgaggatactgccaaagctattttcgacgttgacgattatacgacgtacgtgcatacgcaaagcgaaacggcactgcgtcatgtggcaaccacgtacgcctacgactccgataccgaggcgatcacgctgcgcagcaacatcgaagaggtgtcggctgcgctcaaggaggagctgtcggttcgtctcgagaaggcgggagtcgtcatcgacgacgcgcggctgacccaccttgcctacgcgcccgagatcgcccaggcgatgctgcgtcgccagcaggccgaggcggtcatcgccgcacgcgagaagatcgtgcagggcgcggtttcgatggtcgacatggcgctcaccgaactggcggcgaagcatgtggtcgatctcgacgacgagcgccgcgcggctatggtttcgaacctcatggtggtgctttgcggcgattccgaagcgcagcccgtgctgaacacgggtacactgtatcaatagcgaattgtaggcgaccgccggcaccgccgcatccctcttggcggcaacggcgttcgggatccatgcgatagtgaggcggtatcgaaggcgttatggcgaagcggaagcaataccctttacgcgttgattcggaggtgtgggaggccgtcgagcgatgggcttccgatgatcttcgcagcgttaacgcgcaggtggagttcattctgcgaaaatcgctcaaagatgccggtcgcctgggaaagaagaacgcttcgtcggatgatccggaatcggatgcggagtgagaaagaggcatctaaggccccgatcgaaaagacacgaactggctttcgggcgggagtccgggtgggcggagcgactctgccgcaagcctgagagaccaagcagcgcgaaaccggaaggcggccccttaggccgccttccttcgtttcagggatacgctcagcgctacgaacgccaaggccatcgcaataagacctgcgccgtcgaatgcgacgaaacgcaggatgctcgatgcgaggagctcgtgtccggcgggaatggaggcgaggatcgcgctttcgccgataagcccgatggcctgctgcgccagcactacgccgaaaagcgcgcggtgtttgacggggttggcgatggcgaggggataggtggcgttccacatgaggaacgccactccaagtccctgcatcgcgatgcggccttcgaatcctgcaagctcgtaggcgggtgcgaacgcatcgggccacagaacgaactggaccgcgcactgcacgtttacgacgaagacggctgcaagcgctatgcgggctgcgcgcagagcagccttgctcgccgtacgctcctgcacagcctgattcacggattcgtcctttctcgcctcgatcgatgcagccattgtacccgaagcatcgggattcgagccgaatggaggcgcgctgtgaacgttctgaaacgttcgcttaggcgtcctgcttgcggccgaggtcggtgttgtcgtcctcggtcgtgccgaccgttcagcgcgaacggcgatgccgagcggtttgtcgttcgcggcttttcgcggagacccgccatgtccccatgcgattcccgatcgcaccatgagtgctatactgagccgaaacgaaaaccaacggcatagataggcgtatacggcatgatcatcaagaaatcaccggccgaaatcgaggcgatgaaagaggctggccgcatttcggcgaaggtgctccgcgaagtcggcgcgcgcgtgcagcccggggtgtccacgctcgagctcgataggttcgccgagacgttgattcgcctcgaaggcggtatccctgcgttcaaaggctacggcgggtttcccggctcgatctgcgcttcggtgaacgagcagatcgtccacggcatcccctcggccgacgtcatcttgcaggagggcgatatcctttcggtcgatacgggcgccatcgtcgacggctgggtgggcgataacgcctggacctacgctgtgggctctgtatccgaggaaaagcagcagctgctcgccgtaaccgagaaatgcatgtgggccggactcgacgccgctcgacccggcaaccgtctcggcgatatcggcgcggccatacaggagattgcggaggctgcgggttacggggtcgtgcgcgaatacgttgggcacggcatcgggcgcaatatgcatgaagatcccaacgttcccaactatggacgcaggcacacgggcgtcttgctcgaagcgggcatggtcctcgccatcgagccgatgatcaacatcggcacccataaaaccaagcagatgcccgacgggtggctcgtcgtcacacgcgacggaatgccttcggctcacttcgagaagaccgtcgccatcaccgaggacggtcctgtcgtgctaacgaccgaagaggggcatcgcaggcctatctagcgcgcttcggccgcgcttgcttcgctggcggcgggcggctctgtcgcggtatgtcggcgcccgtcgcgcggctcctcggtgtgtatctttagcgaacgggcttcgggcctttgcgctgcttgcttataataaacgttcgtcatatgaatcaacccgtgtggaacgggaatggaaaaggatccgcgtgaacacttcagttgatttcgccccggtgcttttgggcggagatgccaacgcctacggaatggcccgctcgtttttcgaggagtacggggtcgtttcggccgctatcggcaaaggcgcgttccatatctgccggcacagcaagatcgtccgtttcgaagtgtgcgagccccgtctcgaagaggacgaggtgttcgtcgaaacgctcgtgcgctatgcccgcgatcataagggcgcgccgctcgtgctcgtgccgtgcggcgacaactacaccaagatgctggtgcgcaaccaggataagctgcgcgacctgtaccggttcaacatcatgtcgcccgatcagtacgagctcgtttcaaccaaggagcgattctacgatacgtgcgagaagcacgggctgctgttccccgaaacctgcgaggtgacggctgagacggcgcaggggttcgaaccgccgttttcgtatccggttgttgtgaagccttcgaacagcgtggcgtactggacctgtgattttccgggcaagaagaaggtgttcgtcgtcaagagcgccgatgagatgcgccggattctcgaaggcgtgtactcgtcgagctatcgggacggcatgatcgttcaggatttcgtcccgggcgacgatacccgcatgcgcgtcatcaactgctacagcgatacgtcgggagccgtcaagatgatggttttgggcgacgtgctgctcgaagagcacactcccgaaggaatcggcagctacggtgccatcatgaccgggtacaacgaagagatcaacgggcgcatcaagggctttctcgaagagatcggctacgtgggctattcgaacttcgatttgaagtacgacgagcgcgacggttcctataagctgttcgagatcaatccgcgccaaggccgttcgagttatttcgcaactgcttcaggcaagaaccttgcgcgctatctcgtgcaggacgtcgtgtacggcgaaagccatccgatcgacattgctaccctcgaagacgagatgctgtggactatgatcccgctttcggtcattcgcacctacgtgagcgatcctggcgcgcgagagcgcgcggagcggttgatcggcgagggcaaggttcgccgatcgtattggacgaaagacgatcgatctcttctgcgttatctgagctatcagatgaaccagaaaaactatcggcagcagtacagggattgcttcaaccgcaggggcatcgacgactgatgctgctcggcgctggctccgtgccggcggttttgccgcagacgggtgcgggcgtgaaacgggcgcgcggcgcggcgccgccgaagccgatagggcgtttgcgcggtgctgcggctcgacgacggcaggcagtgggcgagagatgaacggagaaagcgaggtgcgcacgtggaaaagctcggaatcatagggggattgggcccggcggctacggcgcggctgttctctcggatcgtctcctataccgatgccgcctgcgatcaggaccaccttgacgtgacgattctcaaccgcccgtcaatacccgatcgcacggcgtttctcctcggcaagccgggttcggaatcgttcgtggagcccatgcgtgccgcagccgtcgaactcgagtctgcgggttgtaccgtgttggccacgccctgcaatacggcccatgcccgtctggacgaaatagcatcctcgctcacccgcgcgcggttcgtcgatatgcccgcatcgtcagcgcgcttcgcatgcgatctcggctgcaagcgcgtgggcgtgctcgccaccgacggggcgcttgcctccgaggtgcaccaacgcgcgctcggcgcagtcggcctcgaggtcgcaatacccgaagcggcggtacaggaaacggtcatgagcatcatctacgatgacgtgaaggcaggtcgggttgccgatgccgataaggtggcaagcgtatgcgatgcgatggcggatgcgggatgcgacggcatcgtgctcgggtgcaccgagttgtcgcttctggggctgccgcgcaggcgcgagggcgcatgcatcatcgatgcactcgatgtgcttgcgtggaagtgcgtgaccgaatgcgcggggaaagcccgtgatctgagggatgaatatcagcggttcgagacggacggcagcggcgcggccaacggggtcggcgccggatcgatcgagtaaggaagttttcgacctatgtgcggatttgcaggctttgtcaacaaccggaccgatatagacgctgcgcgcgtcatagagctcatgggggatcgcatcaagcatcgcgggcccgatgacgcccagtactacatcgacgacgacgtggcgcttgcgtttcgccgcctgtcgatcatcgatctgggcggcggtcgccaaccgctgttcaacgaggacggctcgatggtgcttgtattcaacggcgagatatacaatttttcggaactgcgcgaagagcttatcgcccgcggccacgtgttcacgactaaatcggactccgagacgatcctgcacggatacgaggagtacgggcgcggaatcctcgaccgcctgcgcggcatgttcgctttcgccatttgggacaaaaacgagaagaagctgttcggcgcgcgcgatatcttcggcatcaagccctattactactatcgcgaaaacggcctgttcatgttcggctcggagatcaagagcttcctcgaccaccccggcttcgataagcgcatcgaccgcacgcgcattgccgattatctgtcctacgaatatctgcccgatgaaaacacgctgttccaaggcgtatacaagctcatgcccggatcgtatttcgagtggacgcccgagagcttcacgaccgaacgctactacaatcccacctacgcgatcgacgaggccccttctctcgacgaatgggccgatcgcatcgaagacgtgttctccgaatcggtgagggcgcaccagatcgccgacgtcgaggtgggcggatttctctcctctggcgtcgattcgagctacgtggtcgatcgcgtgtttgcgcagggcacgaagatcaggacgttttcggtgggttacgaagaagaacagtacagcgagctctcgtatgcgaagcagttctccgacgaactgggggtcgagaacatctccaacaagatatccgctgccgatttcttcgacgccatgcccgatatccagtactttatggacgaaccgcttccgaacccctctgaaaatccgctgtacttcttggcggaaagcgccgcgaagcacgtgaaggtggttctttcgggggagggggccgacgaactgttcggcggatatccgaattacctggcagaagaccacttgggcagatactgccgaagcgttccgcgccctgtgcgccgtgcgctcggagcggttgcggggaagcttccgcgtttcaagggccggcattttctcatgcacggcgccatggaaccttgggagcggttctcgcgtgccgattacgtgttcgagaacgaggatcgccagcgctacctcaaagatcctattacggggccgacgccgcaggagcgctcgaaggcgtacttcgagcatgtcgacggactcgatgcggtgacgcagctgcaatacgtcgacatgcagacgtggatggctttcgatatcctgctcaaggccgatcgcatgtcgatggcccactcgctcgagctgcgcgtgccgtttctcgataaacgcgtgctcgagacggcgctgcagattccctcgcgttatcgggcggccgacgacgaatcgaagatcgcgctcaggcatgcggcggcacgccatctgccggagcgcgtgtacggcaaggagaagctcggatttccctcgccgcttgcggcatggttgcgcgaagacgagtactacgagcgcgtgaaggcggcgttcacaagcgaggcggcctgcgagttcttcgtgcccgaggcccttgtcgcgctgctcgacgagcaccgttcgggcgcggtgtccaacatgcagaagatatggtcgttctacacgttcatcgtatggtacgaggaattcttcggttcgggagagcgcgccaactgccgcgcatagggtgacgtgcgggcttccgacgcgggtagcccatgcaacgggcggaccgactgccgcgcgcgcgacgatgcggcagctgcccgatgccgttctgacatccggtacgccgtatgctctgccgttgcgcaggcggcgtttgttgtcgtttcggttacgacggttctctgccgtctctggcattctcgcaaagggcgataccttatcttgcggcttcttgatatcgttgctaccctatgctgtgccctcgcaaaggggagaagagaagcctgcgacaaaataccagatcagagacttgtatgggagtattccgcacgatcattcccatacaaggagaccttatgtaccttttttgaatggcttggattggtcgctcgccctttgttatgatcggccttgctttgagcaattacatagaaacaaggtgcatatgctgactttaactacacaacgcactttccgtacaaccatgtctcttttcttggcgtttttactggttgcctctttggggctgatagctcccgtccaggctcttgcggtaacgagcgccgaaaagcaggctgaagcggatgacatcatgcgcagcatcgattcgctgcaaacccagcttaacgaggcgaatgccgaattcgagcgagcaacgcaggaatacgagactgcaaaggcggccgccgaggatgcggccgatcgcgtgcaggctgccaaggagcgcatcgccgagctgcaggaacgcttgggcgatcgcgccgcgagcatgtacaagacgggcggctccatgtcgttcatcgacgtgctgctcggagcatcctcgttcgaagagctggtgacctcgtgggatgcattcgagaagatcacgagtcaggacgccgagcttgtacaggagagcaaggatgtcaaggccgaggccgaagcagccgagcaggaatacaacgagcagaaggccaaagccgccgaagaggttgaaaaagccgaggccgctcaacgggaaatcgaatcgaccaaagcttcgatggaagaagagctcacccgcgtgaacgaagaagtggtcgcgctgcaggcgaaagaggaagaagagcgcatcgctgcagaagaggccgagcgcagggcggaggaggcaaggcgtcttgccgaaacgacggtcgttcccggcacgggcggcggtggcggttcgacgaacaccggcacctcgggtggcgacggatcggcgaacaccgcggggtgggtcaatccctgcccgtcgtattacggtgtaaccaacgagttcgcatgggcgggcgcgtgggacggcaactaccacaacggcatcgacctgggtgcagcatcgggtgccgacatcttggctgcagggccgggaaccgtcacctacgtcggatggtacggcacgggcggtaacgcggttatcgtcagccatggcaacggcgtccgcacgatttacatgcacatgagcgcgcaggcggcgacggtcgggcagcaggtatccgccggcgatctgatcggctacgtgggatcgaccggctactcgacgggtccccacctgcacttccaaatagaaatcaacggaactccggtcaatccccgcaactacttcagcttctagttcgcgcgggcgggaaaccgaggaggcttgcatggaacggaatcagacaaaggtaacaagacgggcgtttctgggtggtgcggcggctttcggcgccgtgtcgcttaccatgccgggactggcgttcgccgacccgacgtcggcgtcgaagcaagccgaagccgacgaggtgcgcacgcgcgtgaccgcgatgcaatccgagctttccgctgcgtcggaagagtactacgcagcgctcgatgctcatgatgcggctgtcgccgcatgtgacgaggctcaggctcgcatcgacgaggcgaacggccagattaccgaattgcagggaaagctcggcacccgtgcgcgcagcatgtaccgcagcggcggcacttcgtttctcgatctgctgcttggagccacgacgttcgaggaattcgtaaccaactgggacatcctcaaccagatgaacgaaaacgatgcggcgctcgtgcagcagaccaaagatctgcgcgccgaggtcgaggcgcagaaagaagagctttcgaagcaggagcagatcgcttccgacaaggctgaagaagcccgcgtaaacaaggaaaacgccgaggtgacggtggcggccctgcaagccgaactcgattcgctcgatgccgaggcccgagagcttttgcttgccgaacaagaggaggctgcagctgccgttcgcgcggcggaagcggctgcatccgaggatggcggctctgattcgggcggtggaaccggcggcaataccggcggaggaaataccggcggtggcaataccgatggcggaggctcttcggataacggttccgacggaggttcgtcgggcggaggctcgtcgggaggcggcggcaactacgttcccccgaacggatcggttgtcgactacgcggtctactgcttgggaacgccctatgtatacggcgggaacacgccgggtgtgggccttgactgctcgggtttgacatactggtgctatcggcaggttggaaagaccatcccccgcactacgtacggcatgccggggtcggcggcgtggcaaggttccgtttccgaggctcagccgggcgatgttctgtggaattcgggtcatgtggccatctgcaccgcctcgggcggcggaacctacatccatgcgccccagccgggcgatgtggtgaagtattcctcctggcctcagttctcgcttgccttgaggttctagcgtttcgcttggaatcccgctgcctttgctcggcatcgagcgaagctcgaaacgcgttggaatcaccctgcgctgtcgccttctgcctgaaaatctgccgaaaatggcggtcaaggcaagcttctgtcaaaatttcgttaagtagataatatattcaatttatgcgacctggggaaatgttcgcggctatacttcaacgctgctgtaaagggctgccgacagcctcaaatggcgacagaaacatgccttggccgccattttcgatgtgatttttccgaggataatcgctttcgatccgcttcggttcgctttcgatcatactgggtagaacaagtgccgcctgcagggagtcgatgtttgtacgggaccgctttgcgcaggcagcgcatggggcggctttctgctggacggcgaagggatcgggttgtgggcgatgcgcggatgaacgaaacgaagctggacgatcggcattcttgcggaccgagtgcggagaagccggatccggcgcagagtcgaaacggcgaattccgtcagcgtccctgcgccctgcgcgccgagcgtctgacgtgccgttatgccgctgaggatgtattcgctgacgtgggcttcgagctcgatcagggatcgatagcttttctaacgggtccgaacggggcggggaagtcgacgctgttcagatgcctcgctggctggtctgctccccgcgagggatcgatcgagcttttcggcgagccgttcgacggctcggatcgcacacagcgggcgatcatctcctatgtgcccgatgtgccttcgttctacgatgatcttacggcgggggagcatatccggttcatgctgcaagcgaatgggatgggcgtcgggggatcgaaggcgcaaaccctcatggatcggttcgggctttcgtcccatcttgatcagtacccctcgtcgtattcgcgcggcatgaggcagaagctcgcccttgtgatcgccctttcgctcgatccccggctgctgttgctcgatgaaccctacggaccgctcgatcctgctgcggcgatcgtcttgagcgaaatgctcgtcgaagcgagggatcggggcgcggctgttctcgtaagctgccaccacgatgttcccgcgctcgagccggatacggtgctgcgattggccgatggcgctttgatgcagtttgacgcgaatgcgggcttgtcggaaggcttgtccaccggcttgccgaatctggccgaaagacaataggcatccgcaatgctgcatgatatccgacttctgctttggcttcgcatccgccatgcgcgaaccgcgttttcccgcatgatgcatcttgctggcaccgatcccgcttccgaaggcggcttgggcgagcgcacctaccagctctacatcgtggcgttcgtcgccgtcgccctcgtgcttctctgggcggcgctgctcgatgccgttgcaaccgttttcgcctcgatgggagccgcagggtcgtacgcggtgctttcagccgctctcgtggtgctgccgatcgttttcgcggttgggagcatcaacggtttgcggacggcgccgctcaagttttcccatcccgatattacctatcttgctgcgggcgccctgcgcatgcgcgcgatcgcccttgtcgatattgcggtgcgcgcagttctgatgctcgtgctgggcgcgctgctcggctacctgttgggagcgggggtgtcgagcgggacgcaggccgcattcgatccgcttgcggttgccgtgctcggttctctgggggccgccgctgccgtgtcggcggggcgccttgctggtgcaatccgccttgcggtgccgcggtggcgcctgcgccattcggtcggtgccgcggtgatcgtcttcgcgatagcggccgcctgcgtctttttcggaatgatcgtgaatctctcttctgtgctacccgatgcgcttcccctgatcgcagcagctttcggggtggttgcgcttgcggggatcgccgtgttcgccgcgttggccgagcggttcgatcgggttctcgtcatcgaggagagcgccctgttcgccgatctgcagcccttcggagcgttctcgcccctcgatcaaaccgtcatccagcagtaccgccgccgcaagaagctcgctgcccgtcgacggctgttctccctttcgcaggggaccgggcggcgcgcgcttgtcgcacgtgcctgcctctctgcggcacggcaatacgaagggcttccgagtttgtttgtgcagggagcgctgatcgtgccgttcggagcgtgcgccctgctgggtttgggcggtccgatagcgctcttgttctggctgcaggcgttgctcctgttctcgcagggggcgcgcgagcaaacgcgagcctttagagacgatgtgaggaacaggcttgtgcgcgatcggcttccgttcgatacgctcgagctgttcgcattcgatacgctgcccgcattcgtttttgttgcagtgctttccctgggcgcatccgttgctctttcggcgttcgtaccgcttgtgtggatgataccgctttgcctgctcgtgaacgcgctcggcgcactcgtttgcgccctcgatgcgatacgcttctcgccaaaaggaaaacgggcgagctacgagatgggggcgttgctgctcgttgcggcgctggggccgatttcgcttgcgggagcgcccctgctcacggttgccgcctcgctggttgccggtgcgctgctcgtttcgatcttgcgtcgaggcatcgaatgcgcctaatgcgggagctcgggatcgtgcgacggacggccggcgatcgaggattgaatgcgctggtcaaggtggtttacgggcaagcggttctgtgcgcggtcgatcggttaggagcgcttgagcttgccggtgacgcgtgccatgatggagctcaagaatgcggcttcggggattttgagcttgagcgctatgccgaatgtgacgacgaggcttacgaggccgcagaccacgatgtaggcgaacgcttgcagaatgcttcccgaaaggggagcgatgagcgtctcgacggcgaacagggcggctgcgcccgcgattgcccccaaggcgcctaagacgagggcgcagagaaacgccttcgcggtcgatcgcaggccgaacgccccgaaccgcctgcgcagatatgcgaacaggcagatatcgcccaccaggtagaatacaagctccgctgcagcgatgctctcgatgggaacatcggcgatgccctcggttgcgatgaatacggcggctccggtaagcgcgacctgtacgacggccgcgatgatgttgaagcccgcgaacacggtcatcttgcgcaggctgctgaagatcttctgcaagtaggtgttgaggccgtagaaaggcagcgatactgcgaacacggctagataactcgcgatgatcgcgatgttgctttcggtgaaggcgcctgcgcagtacatcgtaatgagcggcgtggcgaacacgatgaggtaaagcgcgaaggggatcatgaagaacaggatctggttcgtgcccgacacgatgccgcgcttgaccccttcgatgtttccttctgcctgcatatcggccagctcggtgaacatggcagtggtgatgggcacggccagaaacgaataggggagcatgaaccacaggcgggcgtagtaaaggatcgacggaccgtttgctgcgaaggcgtaagatgccgcgctctgcaccgatacgacaaccgatgagctcagcatcacgatgacggcggggatgccgatggcgagcgtttcgcgcagtgcaggatcgcgcaggtcgatgcgcgggcggatgcggatgccgttgcgcttgagggcgggcagctggatggccatctgcacgaatacgccgagcgggttgccgatggcgatgatgtagagcgcaagctgcgggtcgttcggcgcgatggccgcgtaggcgaaaaacgttgcaatgacgatcacgttgttggcgacgggcgcgatcgacgaccagaggtaatctcgatttgcgttcagcaagcccgatacgacggcgctcgccccgtagaacacgatctggatggcgaagaactggaagaagaacaccgaggttgccatttcggattgatcggagtagaagctctgcgtgaagatggcctgcgcggggaaggccatgcagacaagcgatacgatgccgagaagaatcaccacgagcgtgagcaggttcgaggcgtagcggttgcccgctttggttccgagcttcttcttgaccgaaacgtatacgggaagaaacgcggtgacgatcatgccgcctgcgacgagttcgtagagcatgttgggcaggttgttcgcaacggtgtaggagctggcgagcagcgtggagccgagcgcgaacgccattgcccaggtgcgcacgaatccggtgatgcgcgagatcatcacgcatacgctgatgagagccgccgatgagctgaccgttttttctccctcgccgtcggacgctgcaacgagatcgtggaccgccccctcgccatcgggcgtgcgggagatcatgtcgtcggatgcgttgtagatttcgggctcgggagcaagagctgcgccatggcggctaggcaccgtgttgcgggatgcgggccggtcgtatcctccggccgtcgatttcgcgtggcgcccgatcttgccagattggtttgcgccgtcggccgtccgtttgacatggcggcccgcatacggatcgtaatcggtttcgtcgatatcgaagcctagctcgccgattcgatggaacgagccagtggtatcgggaagctgaaggagctctctttcaaccgcttcgcgggtatgtttggctcgtgagagcttgtccgacatcgaatgggccttcttgctttttggatataatggttcacatcatagcaaaccgagaaagaggcgtttcatgcatatcctgatagttcgcaataactccaatgcgaaagcggttgacgcctcgctgcttctcgctgcctatctgggtactcaatcaatcgagttccggattctcgattcgtccgatttgagctacctgggcgatgtcgatgacgtcggcgtgctcgatcctgccgtttgcgaccttgcggtcgtgctcggcggcgatggcactattctacgtaccgcccgccttgtcggaacgacgggcgtgccgatcctcggcatcaacttcggccgtctcggctttctggcgaatgcgagcgacgagggcgtcgtggccatcgtggcggccgcccttgcggaggacgcggtgcgcgagcggcgcactaacctgcgcatcgacgtgctctgcgaaggagacgacctcgacgatgcgccgtgcgtcggcgacgagcccgttacggcggaaaacggcgagcgccggagcttttttgcgctcaacgagcttgcggtgacgcgcggagccatgggccgcatcatcgatttctctctgtccatatccgattcgcatatcgccgatatgcgcggcgacggtcttgtggtggcgacggcaacggggtcgaccgcctacgcgctttcggcaggggggccgctcgtatcgcctggattcgagggtctggtggccgtgccccttgcaccgcatacgctgcattcgcgggcgatcgtcacggcgaaaagcgatgtggtggaagtcgatcttaccaacaaccaggcttcgcgcgaggcgacgctgttcgtcgatggcgaaatgctcgtcttcgagcgtcccgtcgcccgggtgttcgtccgtgcgggcgctgcgcccaccgtgctgctccgttacaagtgcgagaatttctacgatcacgcatcgaaggtgtttttctaggatccggggcgtgtcttcgaggctcgaggcggttcgtgcgttttcggtcggcggccgacgggagtgtcctacgggcgcggcgtgccgagggcctgcgttgtttcctggtcgaacaaaagcagctcttcgggttgcaggctgatcgtcgcctcgcctccgacgcgaggcttcttttgcgggtcggaggattcttttcccagcacgcttgcgcccccgaggtcgacaagcgcgtacatctcggcgccgattctctcccgtcgcacgcatacgccctgcaaaccccttgaggggcgcggctccgtttcgcttgggcgacgctcgacgtgcgtatgttcggggcgtatgcctgcgatcaagcggcggccttcgaggttcgaaggctcgaacgggaggcgcgccgcatcgaagagtcgctgtcgaccgctcgctgtgcacagcccgccgccgatcgcgctgcgcgcaagatagggattcgtcctcttacttcgcaggcgaggaggttcatgctcggcgttccgatgaactcggccacgaaaaggttcttcggtctgaggtacagctcgtcgggcgttccgatttgctgcacgcgaccttgatccatcacgacgatccgggaggcgagcgtcatggcctccgtttggtcgtgggtcacatagattatggtcgccctcgttgtgcggtgaagccgcgccagctcgccgcgcatctgggcgcgcaatttcgcatcgaggttcgaaagcggctcgtccatgagaaacaccgcgggatcgcgcaccaaggctcgaccgatggccacacgctgtttctgcccgcccgacagctttgcgggtttgcggtgcaggatatctgcgatgccgagcgtttcgcttaccgcgcagactcgccgttttcgctctgcgcgagggacccttcttaccgtcaggggaaaagcgatgttgtcgaagaccgtcatgtgggggtagagggcgtaatcctgaaacaccatggcgatattgcgctcggcggggggcgtgcgcgttatatcgcgtccctcgagggcgatcgttcccgagtccggtgtctcgagtccggcgataagccgcagggtcgttgacttcccgcagcccgacgatccgacgaatacgatgaattcgccgcgctcaaccgaaagcgaaaggtcgtcgactgcccgtatcgtgtttttgccgaaagccttgcatgcatgctctatcgcgagaaacgccacctgattcaccttgctttcatcggggcgctcttggcgccgcgcgtttttccatggtgcgccgtcgtgcgcacctgccatgttcggtgctgctgtactgcgccgaagaagagcgcgaccgcgccgacgcagagtgcgatcgcgagcgcgcacgcgcccagggcgggctcgccgcgtgccgcatccgctgaaagcacgatgcggaaaagaccgctttccaatgcttcagccgattcgccccatgcggcgaaatccgaccagcggttcggaaagcagtcgccgaaaaccgaaagagccgaagcggccaccgtcgtccatgcgatggcgaaaagcgcacccggaatgcggctcgccgctgcaacggcaagcgaatcggagcgcatccttgcacgtcggcagcaaagagacatgcagatccccagagccaaggggtagagcagcaagacggaatacgaaaccagggaaagcagccggtagtcgatctggcggcacgactcacctagaacgggggcgagcgtgtttgccgtcacgggaaaaccgtctgcatcgaggcgtgcggtcgtgaagcgcgaaacgtgtcgcccgttcgggttttcgccttcggcgtcgtcgaacagcaaggcgatggattcgtcgtgcgcggttgctgccgcttcgattgcggcggcctcggcgggggataattcgccgccgtgcaaaatgaacgtgcttgagacggcccatgaatcgcggatgctgtcatgcgccgcatacgcagcgaagaagcaggcgagcgacagtgcgaacaggatgcacgccgcaagcggcagcttgcgaatcgcgttaaggctcggcatggcttctccgaaccctatcgttttcggacagcgtgcgatccgaccgtacgacaacgtcctgtcgagccgaaagagccccgtcgctgagagccgtccacgctccatcggaagcgaccggggccacgtccactttgcgcacgatctgttcgggccccagaaggcccgatcgctcgtcgagcacgtacacgtaggttcgtgctccgtcggagtacacggccgtcgagggcacgcaggatgggtatatggtttccgaaagcgttttctcctgcatgcgttcggtggcgacaagcgcgattcccgtgccgtcgacggctcgcgagaggatgccgaggcataccatcgagaccatgaacaaaaacaggatgcttgcagcccgtcgcctcatctagcgatcctttctcgttgtcgcggcgatgccctgctcgaggtattcgcgacccgttgcgaacacgagcactgcgggtatggatgcgataaccgtcgaagcgaacacgaggccgatgctctccgaagcgatcgccggctggaaaagcgaaagcggccaaagcgtttggtctctcaagaaagcgagcggctgctcgacgaggttccagtattcgaagaacccgagcacgagagaggcgaatatgccgggcgctccgagggggacgccgattttcaggaatatcgcgaattcgcttgccccatcgagccgggccgattcgataagggagttcgggatggtggcgaagaagtgccgcatgatgaagacgggaaacgccgagaatgctcctggcaggatgacggctgcgagcgtgtcgttgatcccgagcgcgttgagcacaagatagttcggcagcatcgtcgtctgaaacggcagcatcatcaaaagaacgtagaggaagaacagcgcatcccttccgcggaacccgaatcgcgcgagcgcccaggcggcgggcgttgcgactgcgagttggcccgcgagcacgcaagcggtaatgaccgccgaattccagaacagcacgtggtatcccggtgtatccacgagcacggccacgtacgattcgggggtaggggccagcggaagcagcggcgcttcggcaaatccgtttccgccttcgatgacgccgccgagggtcgaggcgagttcggaagcgctcatgagggaccctagtgcgagcatcgcaagggggaggaacgcgcagaagccgagcgcggccatggcaagcaagaagagcatgccgcgcacgcgcgctcgcccggggtttttccaaggttcgcccgtcggcttcggtgtcgcttcttttcgcgccttgtttcgcgccgatgacatcagcgcatcgtctcctgtttgttccaaaggcaaaacagcgcgcatgcgattgccaaaagcacgatgccgagtatcgttccgcctgccgcgagctttgtgatcgacaggcttgcgaaccaattgttgaacaggtggggcagcatgtacatgctctcgtgcgggtagcttcccgcaacgaggtacgcttcgcggtagaccttgaacgcgttgacgatggccagtattgcaacgacggcgcaggagggagcgagcatcggaagggttatctttgcggtgatctgcgaaaaagaagcgccgtcgacgcgagctgcttcgtagaggctttcggggatgcaggcgagggcggcaagccagagcacggtgcagtacccgaggttgcgccagacgtagttgccgacgagcacgtacagcgctgcatcgcttgaaagccacgcgacggtatctatgccgagaaaatcgaggatgccgttggcaatgccttgggcgtcgaaggtgatgttcatgagaagcgccgccgagaatacgggaatcgcgaggggcagcaacagtgccgttttcatgagcgcccgaaacggcgtgcttctgcgcacggcaagcgctatggcgagcgaaagcgcaagcagaaggggaatgcagataaccatgaacttcgccgtgttgcccgctgcggttcgaaacgcttcgttgccgatcactgcagcgtagttctccaagccgacgaagcgctcgcccgatgcatctgcaagcgagcggcgcacgacgtcggcagagggagcgagaaagaagatggcgaggccgatgaggctcggggccagaaaggctttgggggcggcggatcgctgcggacgcgtcatgggctcctctttcctattgggcccggtagaggtcgatcttttgcacgcatgcgcttacggcatcgtcgagcgtcgcggtgtcgttgcagtacgcgagaagctcggtcgcgacgatgtcgtttacggtcttgtcttccacgaacggatgcgtggcgctttcgatcagcgcgcagcccgctgcggcctcctcttcggtgaacggccctcggtcgaagctcttgacgggtccgtcttcggacatggcgctcatgccgtagccgccgagcgcgatcaggtagtcgtacagggcgctcttgttgacgggcaagccgccgtcgtagagcgattgcccctgctgttcggaggagagcaggtaggcgatgaactccttggccgtttcggcttctttgctgcttgcgttcacaccgaggatgctgccgggtacgaagacctgctctccgccgaacgcaagaagcttgtaggaacagtcgaactccgcgttttcggcggcaaggctcagcatgccgagcgaggtgctcgagtccatcgagccgatttccagacggctcgcttcgcctcccgaaatgcccagtatccccgcgccgctcacgccgtgaccgtctgcaaggctgacgcttgaaagttcggttgcgcggtagtcgtaaccctggaggtttgcgcgggcttcttcactgatgtttcgagtgaggttctcatccccgatgtcgatgagcgttttcgtgcaggtgaaaaacgattcgagcgcatcgcggtcaaccgatccgtcgccttcgaacaggctttgggagcttgcggcgaagagggctgctacggaagtcgccgtgttgaggcccgcccgtgcgtctttgctcgaagcgatgaaatcggtcatctccccaagcgaggtcgtgtgctcgagatattcgacatcgccgagggcgacgggaaggaagaatctgccgggtacgcaataggtgccctcatcggatgagaaggcgttcagcacgctttcgaagtattcgtctttcgatgcatgcaggtcttcgagcgcatcggacaggtcgagcagcgcgccctgtccgatgaacgcctcggtcggcaggccgtcgagcacgatgacgtcgggacccgttcccgctatgatgtcggcattgagcgcacgcagggcatcgtcggcggcagtgcccgagccggcgggaatcccgatgcgcatctcgacggcgatttcaggtcgctcgtcacggaaggtcgcaacggcctgttcgatggcgctgttgttttcgagcgagtacacgacgagggatcccgtggcttcgggcttgctgccctcgggatagcggtagagggtgtagggggcaagccccccggtcttgttgtggcacagtaccaggatgtcatcctgtccggatccgatgagcaggcggtgcggatacttcaccgcgctcgaaaggcttgcgtctccgctttcggcaacgacggttgctgcattgtcggagatgcggtagatagcgcctttcgcgcaaacgagcaggtcgtcctgtccgttcgaccagatgggcgaaacaggatcggtcgagtctgcatgggaaaacaccttttcgagggcggcgacgatcgaggcatcgggatccgccttttcgcccgtatcgtagtcgaacgcctcgaactcggtttcgattcccgctccccccgaacgcgagacggttgcgtagacaagcccgtcgtacacggtgaaatcagaaagcaccctgccgcccccctgcaggcggtattcgcattgcttcgcgcccgtcgcaagatcgattcggcagagcgattgacgggtatctgcgacgagaacggtgtcctcgtcgcagctgcgcagggtggagattccgcttgccgagaaggggaccgcttcaaaggatccgggcaccacggtgtagagattcgcttcgctggaatcatcgcatgaaacggcgcacgcgagcgagccctgcggcgtcaagcatgcagcttcgacgcgggcatccttgccaagcgagtcgatcagggcccgagtgtcgaacgtcgtttcccagacatcgtcggcggagagcgcgtataccgtgactgcctcggaatcggcggcgcttgccgccatggtgagccggccggcttcgtcgaatcgcatatcgtgcacgagcatgacgttatcgggcagggcgacggtctgttcgtagcgctcggttgcggtggtctcgacgcttggggcctgctctgcgggactgcaggcgggcaggcaaagcgcggcgataagggccaaggggagcaggttcggtttcatgggggtcctttcacgggttcgggcgcggcatcgcccgacactgcggttgcggtgcggtcgaagcaggttcgctttgtttcgattgctttcggcgcggcgtcaagccggcggcggttttgccatgctactcgagccagagccggtagacggtttcggttgcgtagtcgggcgtttggatgcaaaggtttgaaagatccggatgtcgcctgtcgccgccgaggactttgtcgggcacgaggtaggggaagacgtaggttttcgtttcgccgggttcgatgtggatgtaggcgtactgaatgccgttggggtcggggttgtcgagatagacggggtcgtcgttgacggcaacgaaggccgaatcttcgaggacttctcccgatccgagcgtgccatcggagagcggtcccgcctcgatgatcgcctgatctccgaaaacaacgctttcaccttgcatttcgcaccaatcggttctgaagaggttgcacgaaggcagtgcgcctttgccaaaggggtgggggtatcccgaaatgagctcttctgattcgttcgttatggagacggatacgaggatcatggtcgtgtcttggagattgaggttgccccccggatgaatgaaggaccccctcgtgcgctgctgtttgctcgaaaaattcggatagaggtcggcgaacgaatcagccgatacggttcgaacctcttcgatccgcattgcaaaggggggatattcgtgctcccatgcgccgatgctttcgagctggtctctgtacgcttgtctgccctgctccgtttgcagatcgctgcgcgtttcgtctaaggtaaacgattctccctggacgacgcctttcaacgtcgcttgctcgccgaacagggtgtcgacggtgttctgcacgggcgttccgttgccgctgtacatgtttgcgtacacgagcgtttcaggtgattgcggcgttccgggaacgtactgcccgacaaaccagcccatgacgagggcgatgatgacgaggcagacggtgccgagcgcggtgcgtcgtttacggttatcctgcatcgccgctcctctcggatgatctttgggtgcgatggcttccatggggttgaatctagcagtacgcacgaattcggaacaacggtgaattttttcacccatgccctcaccttgccgaatggtgcttcccatcgtagtattatttgctccgtcgatcaaacgaaagcgggtatggccgtatgtctgaaactgagtcgattgtcgttatcctcgcgggcgttgccgtcgtgttcgcgttgtgctgcgcttccatcgcccgagcggccttttcggaaacgctatcgagggcgcacgttcaagtggcgttctactgggggatcgcattcgccctcgcactcgtcggctgccttgcggtaacgcagttgtgggggaatgcgtcgtcggctctctactccgtttcattctgcatcgtatcccttgccgcaggctggttgctttcgcggacgtggaagcgctccgaagcagccgagctcgcatcgattcgcgagctgagggaattcttcgacgcgtatcgcccgagcgaagcgtcggttgaggaacgctgttctcgcgcagcccgggaatacgatctcacgaggcgcgaggaggcgatactcgtcttgctgcttgaggggaaaacccgcgccgaagtggcggccgaactctacgtttcggacaacacggtgaaaacgcatattcgcaacctgtatcgcaagatgggggtttccggcaaaaccgagctcgccgaggccgtgggggcgcccgcttgcaggtagggtggccttgggcgagttgcgggcgaagtccgttttggaaagtcgaacgcttcgcgcgagggcaaagaatccgcttcgaccgcgtgcggatcgctttgcatgcccgccgggcgaaaatgattcccaacttactaagtaactacttacaaaatatggtaatttcatatatactttcttaaatgattggatttttatatcaattccaatcctaagagagaggcgtgagccatgagaaacgcaacgattccgggaagaccgagcgttctttttcgccttgcactctgcgtgctgctcgtgtggggattagcaccgttgagcgcgttggcggatactccttcttccgaagcgctggtcgaaggggaggaggtttccgctcagggcggccccgaagtgcccgaaggcgccgccgccgatccggacggggagggtctcggcgacccgccttacgaggaatcaacaggggaaacatcgttcgagccgcttgacgtgcgcgatgcgagcgacgcttcggcagaggtcgaagccgataccgccgaagcgattgattttgctgcggtatccgattacacgggccttgtcaatgcggtcgcctccgcttcgcccggcgcgactatcgaggtttcgggcgccattgtctttgcggatgtgattcccatcgacaagccgctgtccgtcgtttcggccgatggagcgcatttgacggctgccgccggcaagcggcatttctcgatcgacggcgcttcgatcgtcggcggtcagggcgtcgtgttcgaaggcctgacgctgtacggccccgtttctgcggcgcctgatgccgaaaacggcgggatctttgcaaccaacatgagctcagcgacgctttcgctgacagattgcaccttttcggggaacgaaaacaccgaggctggagcgaggggatacggcggtgcgctggcggttgccagtaactcgcagggcgtgacgctcgtcgattgcgcgtttgccgacaacgccgcgcgcgttgatgggggcgccgtttcgacgaagaactctccggcgacatacgagcgctgcgtgtttcggaacaatacctccggatcccatgggggagcgcttgcgagcgcttcgaacgcgagtcttatcgactgcctgttcgaagggaacgaggcaaccggcaacggtggcggtgcgtcgttcatattcaacaacatcgatccggtaacggtgagggggacgaccttcgcgcgcaatgtcgccgctaattcgggtggtggtctgcacgtgctcaacttcgtattcgacggcataccgaattgcgttgtcgagaacagcacgtttttcggcaacgaagtgaccaatccgaactcggtcggcagaacctacatcggtgctgccgcactcatcgatgcgcaggctactttgcagaacataacggtgatcggcaatagcgcgcccgatagcgcaacggggacgggggctggcatcgtcttgttcgaagagggattcgacggttcttacacccatgtggttgaggggtgccttgctgtgggcaactaccaggacggagccgagggcaacatggggatcatgtccggatctccattcggcgggcagacgtattcttcgtatgccgatgccgttgcctctctgacggagattccggcagcgtctaccctcggcgatatcgtcgtcgtcgactcgttgggtgcgccgttgctggcaagcaacggcgggcttacccagacggttgcgctcgttgccagcggccctgcagtggatgcttacggagcggacgacatgacgctcgctcctctcgcgaccgaccagcgggggaaaggccgtcctgcgggaggcgggcacgatatcggttcgttcgagctgcaggatgacgagcgcgacagggatatgacgatagtgcgcctgttcggcgccgatcgctacggcacgtcgcacaaggtatccacgcacgatcgcagcggatcggatgtggtcgttctcacgtcaggcgaagataggaacttccccgacgcccttgcggcgagcgcgctttcgggaatcgaggataacgcgcccatcgttttgacgaagacgcagtcgctgtcacccgaggcacgcgaagctatcggatccgaattgcagccgagtcgcgtgatcatcatcggcgaccagcatgccgtgtctgctgcagtcgaaagcgaagtccgatcgctgctcggtgagggcgggactgtggatcgcatcggcggcgtcgatcgccaggataccgctgacaagatctacgaagcgtatgcgccggaactctcttcgacggcgattctcgcgcttgcaaccgatttccccgatgccctttcggtgtcttcgtgggccgcgaagacgaaaagccccatcttcctcgtgcatttcggttcgacggggttgaccgacgcgtcgcttgaggcgctgcgtacggggggattcgaccgcatcctcgtgatggggagcacgtattcggtttccaacgaggtcgtgctgcaggcgctttcggcgtcggggctcggatacggcgattacacccgcttcaacgggatcgatcgatacgacacgtcggctcaattcgcagcatgggctatcagcggcgatcggagctcgtccgagctcctgaccgtacatggtgccgccatcgtgcgcggcgacaagcaccctgactcgctgacgggcggcgccttgcagggcagggattcgtcggttgtggtgctgactccgcgcgatgaagtttcgtctgcggtagttggcctgctcgacggccatgtcgacgaaatcggcgagctgcgctttttcggggacgagtatgcggtggacctggatgtcgtaaggcactacatccagagggttccgtacacgtcgattacctggatgcccgatagctcggtggcgatcctgtagcggttcgcctcgcggccgatgcgcagccgttttggtcgtacgattgtctcgatacgacgaagggcctccgaaaccgggggcccttttcgcgactcgtcgggcgagtctgcgcgatcggcgagtcgttctcgcgcgcttacttgtggtagtagcggtgctgctcgtacttgggctcgcagcagacgttgatgccgagcgtgcggtagagcttttcatcggtcgatgagatgataaccgagaaaaacgcatcgcaaccgcgcagttcgccggtgtgctcgatgatctcggctgcaagcgggttggtgaccgagctgatcgagagcgcgataagcgtttcgtctgaatggaggcgcgggttcttgtggttcagatgctcggtcttgaggtggcagatcggctcgatgaccgaatcgctgatgacgtcgatgtcgcccgttccgccgagttccttgagcgcgttgatcatgagcgaagaagccgccccgagcaacatggacgttttgcccgtcacaacggttccgttgggcaggaccatagcgcctgcgggcgatccggtcatctcctctttcaggagcgcagccgtgcgggcgggcgacaggctcgcgttcacgccggcctggttcatgagcagttcgagcttctccacctgctcttcgcccacgccggtgcgcttgacgtcgacggctgtttggaagtaacggcgcacgatttccatcttggcggcatcgcataccgcatcctcgtcgacgatcgcgtacccggccatgttgacgcccatgtcggtgggcgatttgtaggggctttcgccgccgatcctttcgagcatggctttgagcacggggaatatctcgacgtcgcggttgtagttgacggtggtttcgccgtaggcttcaagatggaaggggtcgatggtgttcacgtcgtcgaggtcgaccgttgccgcttcgtaggcgatgttgaccggatgcttgagcggcaggttccatacgggaaacgtctcgtatttggcgtacccggcgttcacgccgcgcttgtgctcgtggtagagctgcgaaaggcaggtagccatcttgcccgatccggggccgggggcggtaaccaccacgagcggacgggtggtttcgatgtactcgtttcggccatacccctcgtcgctcacgatatggtcgatatcgtaggggtagcccgcgatggggtagtgcaggtggcatttgatgccgagcgcatcgaggcgacggcggaacgcgtcggcgtcgggttggttcgcgtagtgggtcacgacgacgccgctcacgagaaaacccatggagcgaaagttatccatgaggcgcagcaggtcctcgtcgtaagtgatgcccagatcgccgcgcagcttgctcttctcgatgtcgttcgcgttgatcacgatgatgatctcggcttcgtcgatcaggcttttgagcatgcgtatcttcgcatcgggctcgaaaccgggtagcacgcgcgcggcatggtagtcgtcgaagagcttcccgccgaattcgaggtagagctttccgccgaactgatcgatgcggttgcggatgtgctctgcttgcagggcgatgtacttgtcgttgtcgaatccgatgcgcatggaaagaggcgtcctttcgatcgagtgtgaggcgggcaggtgcttgccgttgtcggcacgggcgcgttcgccccgcggataccgaggcttcgccgcgcaggcggcagtgcagctggatcgattatagcttactttcgcccgcctcatgcaagccttgttcttccagacggtcgagcagctcttgcttgctatgaatgtcgagtttggcgtatatgttcttgacgtatgtgcgaacggtgttttccgatatgtaaagcttttccccgatgctaatgcggcttcttccttgtgcgagaaggccgaccacttcgagttcccgttcggttaggctatagcgtttccccaaaagggaaagatgctggttgagcagcgtatcttctcggggcttggggttttccgcctcggcggggcttctgcgttggcgggggatggcggagccgtcggaggcggcctcggaagtgctcgagagcgcctcttcggacgaatcgattgccgtttggtttctgaactccgagaaaagatgtcgtttgacgggtatggaatcgttgagcagaagaaccatggcgagggctaggaggaatacgacgaatgcgatcacgatcacggcttcggaagaatgcggctcgagcagccatatgcccgcccttccgatctcccgtggcagcacgtgggcgagccatccgacgccgagtatcagatatgcgggtatgctgctatgccgcgcgatgtcgtagcagctgaaccagagaaggcctactgcgaaggtgttggagatggaaatgagggttgcgcctgcgagcgttgccgtcgaacccgacaatgcgagcagcagaacgcctgcgatgatgagggttaccgagacgttccaaagggttgaaaagcggatggtgcgccgttttgccacggcccaccatatgagggcaagcgagatgaacaacactgaaaactggtgtatcgcttgaaacgggatcgtcagcgcgatcgattcgccggaggggtagccgcgggcaatgccgagggcgaggttgaacagggccatgccggccaccagccgcacgaaggtcgatttcggctcgtcatcgtatgcgaagtcccggctcgaaggcgcttcgcctctcggggaggcgtcaggggttttgtcccgttcgtcgagcagttgattcgacctttgcagcatgacgagcgacagggccggcatgaccatggcgacgagatacgtgacggtctccggtaggagcccgaggaaaaatccgagcatcgagctggctcccagcgaaagaaacgcgtagatcagcgcttcgtctggagaaaggcgttcgtagacggttatccagatgcccccgccccaaacgatgccgcagcctgcgcaaacgcaggctgctatcagcaatccttggttcggcgattcggtgttgatcaggaacaagatgcttgcggccgtcatggcgaaggccgatgcgtatccgagtatccgctgggatctgcgcgggaagccgcggcggaggacaagggcgatgaggatgacgatcaggccgacgcgcacaaggttggaaacgatggtgatgatgccggagtccgtcgacgtgtagcgatcgtagaggttgcactgtatccagatgcgtatggcgacaagcccgcagaaactcaaggaaaacaaggggagaaacgaggcgacgaagcggaacgatccctttcgaactccggtgcggtcgattgtcgaactgcccatgatctccctcgctttcgtctcgggagatggtaccacaacaacggggctcctcatgcggcagagccccgttgttcgtctcgcagcgatagcccgaggttttgcaatcgcgatcggagcacgccgaggcggatcggcgtgctccgacggtgtgcggtgctatgccgacaggtattcgagtgcggattcggcggcccgatgcccgaaaacgttgatatcgcacacggcgttgcccccgagcctgtttccgccgtggacgccgcctgtcacctctccggctgcgaacagcccggcgatggggttgccgctcgtgtcgagcacccgcgttgcggtgtcgattttcagaccgcccatcgtgtggtggattcccggtgcaaccttgacggcgtaaaaaggggcgttcacgatggggttcaagctggccgttcgtccgaagggatcgtcgagaccctgctcgatgcagtcgttgtacgtggtgaccgcgctgatgaagttggccggatcgatctcgtccatggagcttgcgagctcttcgagcgttgtcccgctcagaagcaagccctgcttctcgaacttttccttgatgcttttgttgtcgtcgtacacgtgctgatcgaatactgcatacgcccagccgccgggctgctcccattcggcagccgttaccttatcgcgcgtcaggagctcgttggtgaagcggtttccttcggcgttgatgaggatggccccatcgccgcggatgccttcgctcaaaaggatggaagtgctctgctcgacggtcggatgaacctgaatgtgctcgagatcgacggtgtccgccccgatatcggtggcgattgcgataccatcgccctgggctcccggctggttggtggtgacggcgtcgatcaattcggggcggtattgggcgagcatttcatgattggcaccgaacccgcccgtggcgaggatgacgacgggtgccttgaacgtatactctttcttgccgtcgcttgccacaaggcccgcgattttaccgtcttccatgatgaggctctctacattcatgttcgtgcgggcgccgatgcccctctcggtgcaaaggtcgtgcatgtgggtcacgagatagccgccgacggcgctgccgtcttcgggccgatggatgcggggaaccgatgctccgcccgatgtcgatatcttcgtgaggtgcatgccgcgttctgccaaccgttcgatggcggcgttcgaattttcgcacatgtagcgaatgagctccttgtcgccgagctctttgcctccgacgaacgtgtcttgggcgaacagctcgttgctgtcctcaatgccttcttctttctggagagcggtttggcttgcgttcattccgccctcggcgaagttcgtgttgcctcctacgaccgccatcttttcgagcagcacgacgttcgcgccggcctcttgcgcgctgagggctgccgtcatgccggcgccgcctgctcccacgacgatgatgtcgaactccccttcgtccttggcggccgtttgggccgacccgttttgcggggcgcatcctgtcagcccgacgcccggcagcatggctgcaaggccgaggccgagcgatcctgccagaaacgtgcggcggcttattgtcgtatgcgcgtgctggggtgcgttggtctgtccgttcataatgatcctccttgtttcgaacgcctcctcaaggcgtttgccttgcctatacgatagggcggaaagacgcgcgggcggaagcgtcgtatcgggtggcttctacgcccgaatcgggtgatcctttcaaataaaggccgttcgggggctgattcggcgtcagtcgagggccggtctgccgccgggcggttgcgtttcgaatttgcgtgagcgtgtttccagtgtgtgaaatcgtcgtgcgggtgcgggcggtgcgcatgccgtcttgtagaatgaaaaagcgtttggaagcattgtcgtatgttcgccggcgcattttttgcggggatgcgtttcgctctctgcttgaatccgatcgataccgcgtcggtccgttggctgtcgtttggaggaggatcatgaccaagcacatattcgtgaccggcggcgtcgtttcgtctctggggaagggcatcaccgccgcgtccctcgggcatcttctgaaagcacgcggttacaaggtgaccatgcagaagatggatccgtatctcaacgtcgatcccggaacgatgtcgcccttccagcatggcgaagtattcgtgaccgacgacggccacgagggcgacctcgatctcgggcactacgagcgtttcatcgacgagagcctgacgcgcgagagcaacttcacccagggatcgatttaccagagcctcatcgcccgcgagcgccgcggcgattttctcggcggcaccgtgcaggtgataccccatgtgaccgaggccatcaaggagcgcctgcgccgcgttgccgagcagagcggcgccgatatcgtcatctccgagataggcggcacgatcggcgatatagaatcccagccgttcatcgaggcagcacggcagttcaagaaggagaagaagccgggcgacgtgctgttcgtacacgtgacgctcgtgccctacatcgccgctgcccatgaggtcaaaaccaagccgacgcagcacagcgtgaaggagctgcgttccataggcgtacagcccgatttcatcgtgtgccgctccgatcacgagatatccgatacggtgcgcgagaagatcgcgctgttttgcgatgtggcccccgaagaggtgctcgcctgcaccgacgcctcctccatctacgaggtgccggtgaacctgcacgcccagcgcttcgacgagaaggtgctcgatcttttgggacttgcgcatcgcgagatagacctggcccccttgcaggcgtttttggccgcctcgaaccagtgccggaaacgggtggacgttgcggttgtgggcaagtacgtgagccttcccgatgcctatctttcggtcatcgaggccctcggccacgcgggcgtgcaccatggagcgcacgtcgaggttcatcttgtggatggcgagacgctcgatgcggcttcggtcgctgagaagctcgaaggcatggacggcattctcgtgcccggcggcttcggcaagcgggcgttcgagggaaagatcgctgcagcgcagtacgcccgtgaaagcaaagttccgtttctggggatatgcctggggttgcaggctgccgtctgcgaattcgcccgtaacgtcgccggtatggcgaacgcgacgtcggccgagttcgatcccgaggcggattaccccgtggtcgatctcatgcccgaacaggaggatgtgcaagacaagggcggcaccatgcgccttggcgcctacccctgccgcgtcgagccgggaaccaaggcgttcgcagcgtatggaagcgaggttgtctatgagcgccatcgccaccgtttcgaggtcaacaacgcctttcgcgataagctggccgaggcgggattggtcatatcgggcatttcacccaacggacggctcgttgagatgatcgagctttccgatcatccctggttcgtcgcgagccagggacaccccgagttcaaaagccgtcccacaaggccgcatccgttgttttgcgatttcgtcggctccgcggttgcgcatgccgatgggcgagggtagggcgtgcgcatgctcgacatggagattcgcgagtacatcgcctacctgagcatcgagcgcggaagctcgccgcttacggtttcggcttacgaacgcgatctgagatcatacgccgagtttctcgaatcgcagggcgtggcctcgctttcgcgcatcgatcgcgacgcggtgctcgcctacgaggcggagctcgtcggctcgggcctcgcccccgcgacgatcgagcggcgcgtatcggcaatcaaggggttccaccggtttttggtgcgcgagggcatatccgcaaagaatcccaccgactcgcttcaacttccgaaggttcccgataccttgcctgacgtgttgtccgtcgaacaggtcgatcggatgctgtcgcagcctttcgacgacgatgcggccgggctgcgcaatcgcgcgattctcgaggttttgtacggttgcggactgcgcgtgagcgagctgacggggctcgattcgggcggactgctgctcgacgaggggttcttgcgcgttgtcggcaaggggtcgaaagagcgtgtcgcgcccatcgcgggcgcggcggccgatgcgctgcgcgattatctcgagaggggtcgccccgagcttgcgaaaccctacgcgaaacccacctcggccgtgttcctcaatgcacgaggcgggcgactgacccggcagagcgtgcatgcgatcgtcgcgcgagccgggttatccatcggcgtcgagaaccttcacccgcatacgcttcggcattcgttcgcgacgcaccttctgagcggcggggccgatctgcgcgtcatccaggagatgctcggccattccgacatttcgacgacgcagatatacacccatgtcgatcgcgcccacatccatgacgaatacatcagcgcccatccgcgcgcacggctcaaggcgtagcgcagatcaaggagcggtgaggcttggggacggcgcgcagatcgagggcgaggggctcggcagcctcccgtgcgcccgccttgatgcagaaccgccagccgacctgcgtgcgctcggacgagagcagtctgcggtttggcaaccgtaatctgtccctttctacacagcttccctaatcggacgcgtgcgcagccgttcctagtgtattattccatagcatatctgcacggacggagtggaaaagcgtgaagttcagcatacagaagctcatgatgggccttgtgatcgtcatcgttttggcgttcgtgctgctgcgtggcgatcagcttgtcgagctcgtcgagaccatgaaaaagggtgcggtcatccccttgatcgccgccgttctcacgcagctgtgcaagtacttcgcccagagtttcgcctactcgtattcgttttccgccgtcgaggagaagatggagccgcgcgagacgctgccgcttgtgttcggcacgtttttcatgaatacgatcgctccttcgctcaatatggcgggtgccacgcttgtcgtggatgacgcccatcgccgcggcatatcggcgggcaaggcaacttctgcggcgctccttatgcagatgtccatcgagtcgggcttcatgaccatcatgatcatcgggttcgttattctggaatttgccgggcagctcgatcctctatggttcctgctcgggcttgtggtcgtgctgcttgtggccgtcatggggtccatcatggtgctcgggcataaaaaacccgcgctgctcatgcgcatgcttcgccccgtcgagcgtcttgtgaaccgcgtgcgcgtgcggctcaagaaagagccgttgaaaccctggatcgaaagcgccgtgacttcgttcggcgatgcggccgtcctcattgtgaagaaccccaaaaccactgccaaggtgttcggctgctccatccttgcaagcacctgcgagcttgcctgcttctgtttggtgggcatcgcattcgatgtatacataccacaggctctcatctgcggatacgttgttgcaactctgtttgcgatgatatccgtcacgccgcagggcgtaggggttgtcgaagccgccgtgcttgtgctgttcacatcgtacggcgtggcgggcgctgcgggcatggccattgcgctcgtgtatcgcggccttgtgttctggatgccgttcttgatcggggcggtgcttattcagcgcacgaaatcattcaggcgtgacaagagcgacaagggcgacaagaacgatgtgaagcaccccgacgaacgcgatagggcatctgtcaaaggcgcgacgctcgacggcaagcgccttggcaagggcgattctgccgatgatcacgcaatgccatggacgacgcccctagacggccagagcgatcagccctcgcgcgatcggcgcgccgatgatctcctcgcgcagcagaagaggggcgattcatcgggccggttcgactccgcatcgcgtaaccgcaaagacaacctgggcaaccgcaaggatacctgaggtgctcgacggtgcggtgccgcttgcgatgtgctgcggaccgatgcgccgcggatcgatgtgcgtttccggccgctcggcctgcagtaatccggtgattcccgtgcacttcgaatttctcaagaacttccctggttgaaatcgccttgtaaatggcggtcaaggcaagcttctgtcggcatcggacatggttggtaatatatttaataattgcgaacaggggaaatgccggcagcaatggtcgatcggtccccgaattgccccgtaattgcctcggaaggctacagaagcttgcattggccgccatttttcgaaggattttcggagggaaggcttagaggggatcgcttttcgatgcgtagtggatccgcacggtgcatcgaggggcatcgtcgacggttgcggtcgcgttcccatgtgctgcgcctgtgcgtcccgcatgctcccacctagtttgctcccaccctgcgccaccggcgccccgcgcatccgtctcgcctcgcaagccggtaggacgcgatttcgatatgatcgcgatcgggccattcacggtttgcgcacatcttcgggggtgcttcaaccgcacgtttcccatccgttacccatagtctcccactttgtccccgtctgcatctggtgtccgaaagcggggtggtgcgccatatgtggtgtacatcccatatccgcagcatagagaccgcgttgtcgtggtggcaaagggggttccgtttagggggatattcccgtattttgttgcgaagtgggtcaaagtgggatagaataccacccatcggaaaacactcgagcgaatgaaagggaggcatgcatgacggatctcgttggcgagtttcggcataagctggacgccaaaggccgtctgtcccttccttccgattttcgcaaggtgctaccgatgaacttgaagatcacgctctctccgaagaacgacagcctgtacgtgttcgactcggacggcttcagcgcgtgggttgcttcccttttcgacaaagacgggggattccaaccgagcaactccaagcatgtgaacatgcgcaaggtgctcaactcgcgcgccaagaacgtcgagctcgatgcctccggccgcatcggcatctctgccgatctgcgcaatgcagcaggccttggcaaggacgtcgttttggtgggggatactgaccacttcgagatttgggacgcaaagcgttgggacgacttctgcagcagcgtggatctttcctctctgttcgtcgaagactgatttcaagacgtgagcgcaatgacaaacgaatatcggcatacaccggttctgctcgccgagtgcctcgaatacctacaccttaaaacacagcacatattcgtggacgcaacactcggcggtgcagggcattccctcgaagcagcccgtctgctcgggccggattcaaccctgatcggcatcgatcaggacgcagtggcgcgagccgcggcaaaggatcgccttatggcgcttccggatgacgtccgaccgaatatcgagcttttggcgggtaacttcggcgatatggatgagctccttttgtctgcggaagtgccgggggtcgatgcgtttcttttcgacctcggcgtatcttcggtgcagatagacacgccttctcgtggcttctccttcaaggaggacggcccacttgatatgcggatgaatccgggcaatgacactctaaacgcagcagagatcgtcaacacctacaacgcagcagatctcactcggatcatccgtagttactcagacgagaaatgggcgagccgcatagcggagttcatcgtgaaggcacgccaggaggcgccgattgaaacgagcgcacagctcgtggagatcatcaaggccgccatcccggcttcggccaggcgcgctggaggccatccggcgaaacgtacgtttcaggctcttcgcatcgaggtcaattctgaactctcggtgctgagaagcggccttgaggcggcagttcgatggttgaacccaggcggccgcctcgtcgtcatcagctaccattcgctcgaagaccgtatcgtgaaagacgtaatcgcgggatatgcgaaccgttgcacctgtccgcccgacctcccggtctgcgtgtgcgggaagaagccgatactcgaacctgtcacgcgcaaacccgttttgccgaccgaagaggaaatcgagcgcaatccgcgcgcacgcagcgccaagctgagggtcgccgaaaagctttagatcaagcggatcggaagagccttcaaactcgggcttgagggagtcgcatcggttcaacaaaagaaaagaagagtacagaccacctgaaacgcagctaaaacggaaggagtgagtggtcatgggcgccgcgccagcataccggtatcccgagcggatgcccgaacgatctccacgagtccgtgttgttccagggggaaggcctcaaagccgccccgataccgtatcgtcttcggcgattttcctcgccaaagcgttcgccgtcgtattggtggtgttcgctttgctgggattcgtccgcatcggccttgcttcggctacggtcacgacggccctgtcggctgacgaactgtcgaccaacatagattctgcgcgatccgagggcaacgagctcgaggtgcgccaaagctatctttccaatcccacgaacgtcaagcaggaggctgcttcgaaactcggcatgtccgagcccgagcaggcgctcaccataacgcttgaagcagatgtcgttgccaccgatgcaagcggcaacctgtcgctcgcatcgagcgtggaagctgcatcggcccaggcagccacagcgcaaggctagcccatggctgaaaagcgggggcacacgtcatccggctcgcgccgaacgggctcaggccgcatcgcgtcgcgcggtgcggcgaacaggtcgttcgaaggcgatgcgctggccgacggatcgagccgcgccgcagtggtcatcgcggtgttcgcagccattgcgctcatctttttcgccaggctcgttttcctccaggtagtgaaatccgaggagtattcggcgcaggctcaggaggcgcgtaccgccaacatcgaaacttcgcccagacgcggcaccatttacgatagaaacggctacgtgcttgcaacgagcgtcgatgcgacgaccatctacgcgaacccttacgaggtgacggatgccgatggggcggcgaaccagcttgccgcgattctcgggggagagcccgccgattacaaggaaaagctcacgatgaaagacatctcgtttgtctacatcaagcgcaaagccgacgtagatgttgctgaccaggtgaaagagcttaagattgacggcatttacttcatccccgatacgaagagagaatacccctacggccagataggcggccaggtcatcggttgcgtcaacatcgacggcgagggccttacgggcctcgagctgcagtacgacgacgtgctttcgggtacgggggggacgctcgtggtcgagcgcggccgcgacggcacgcccattccgggaggcgttaaagaggaggttgccgccgtcgacgggcaggacatcatcgtatcgcttgacatcagtttgcaggagaaggtcgagcaaagcctgaccgacggtgtaaaagaggtgaacggcgaaagcggcaacgccatcgtgatggatgcgggcacaggcgagatatacgcggctgcatcgcttcccctgtacgatccgaacgatctgagcactatcgtggacggatccgagacgcaggcgaaatcgatcacgcagatattcgaacccggatcgatcttcaagacggtatcgaccatggccatcctcgagaacaacgtgatgagccctgacgacgagatattctgccctgcggtcatcgaggccgacgagtacaaggtgtcggacgcgcacgagcgcggcgatgaaaccatgacgttgcgccagatcctcgacaattcatcgaacgtcggcatatccctttcggtcgagaagctcggtttcacggaactgtacaacaagatcgtcaaatacaacctcaacgagctgacgggcatcgattacccgggtgaaggcttgggctcgctgcagcctcgggagcagtgggcgaagatcacggggtacaacatcagcttcggtcagggcgtgtcggtcacgccgttgcagatggtgcgtttctacggcgcgctcatcaacgacggcgtcgaggttacaccccatttccttgtggaaaaaccgctttccgacgaaactccgacgtacgctaccgaagacgtcgtcgacaataaagaggcgatccccaccatcacgagcatgcttgaaaccgtggtgacctcgggtacgggcacgggtgcccagatcgagggataccgcgttgcgggcaagacatcgacggcggagatagccgaagaaggcgtgtacaagaaggatatctacaacctgtgctttacgggatttctgcctgactcgagttctcaattggtttgttttgtgggcgcaaacgaggttccagggggcggaaacgtcagctccgtttttaaggatataatggcatttgcgattgaccgctacaagataatgccgaactagagggaacgtcatgggaaagacttgcaaagagctgttcgcagggatcgactgcaccatcatcggaaacgagaacgagatggtcgagggaatcgcctatcggagcgatcgggtcgaatcccacgatgctttcttctgcatcgtcgggcttgtgaccgacggccattccttcgcgcaggatgcgatcgaccacggagccaaggtgctcgtcgtcgagcgcaaggtgtaccttgccgatgcaaccgatatcaccgaggtggtggtgaaggacacgcgcaaggccatggctcaggcgtcggcgaacttctacgaccatccgtcggaggacatcgaacttgtaggcatcaccggcacgaacggcaagacgacgacgacttacctggtcgaacatatagcccatgtcgccggaaggcgcacgggcgtcatcggaacggttggcgtgcatattggcaagaagctcgagaaaagcgagcacaccacgcccgaatctcccgatttgcagcgcctgttcgcccgcatgcgcgacgaacgtgtcaacgtcgtagccatggaggtgagctcgcacgcgctcgatctcgaacgcacgtggggcacgaagttcgccgttacggcgttctcgaacctgacgcaggatcacctcgattaccacaagacgttcgaggcgtacttcgaggcgaaggctcgcctcttctcacgcgattaccccgccaagcgcgtcatctgcatcgacgataagtacggcaaggaactgctgcgccgttgctcggtcgccgaagacagcgtgataaccacgggattcgatccgtcggctcagataaagcccgtttcggtcacctacgaaaccacccatacctccatcgtgctcgacgttcggggaaccaagtactcgttcgattacccgctcgtcggcaagttcaacgtcgagaacatcatgtgcgcattcggcatcggcatgcagctcgggtatccggcatccacgatagtcgaggctctttccgaggctccccagattcccgggcgcctgcagcgcgtcaacggtgcgggcgagaacctcggcatctccgtgtacgtcgattacgcccatacccccgatgcgctcgagaaggccatcgcctcgatcaaggcgcttacgaagggcaaaaccatcgtcgtgttcggatgcggcggcgaccgcgattcgagtaagcgccccatcatggggagggcagcgctcagcgctgatttcgcagtcgtgacgtcggacaatccgcgccacgaggatccgatggccatcatcgacgatatcgtgccgggcatgacggccggcgccgatcgctatgaggtcgagcccgatcgcagacgcgccatagcgcgtgcgatcgcgcttgccgatgagggcgattcggtgctcgtcgcgggcaaggggcacgaggattaccagcttgtcggcgattcggtgctttcgttcgacgatctcgtcgtggcggccgaagagctcgaccgggcctctaagtaggcggcgatgcggcttaactccaaacagatctgcgaatacactggcgggcgcgtgcttgtcaatccgatcgatgcgagcaaactcgcctgcggggtcgcctgggattcgcgtgcggtatcgccgggcgatctttacgtggcgcttcccggcgaaaacgttgacgggcacgccttcgtgccgcaggccttgcgtgcgggggcggtcgtggtactcgtgcaggaagctcccgacgaggcgacctgcctgctcgcgcgtgagatgggtgccgccgtcatcgaggtcagcaacacgttttccgcaatcaccgacctcgcacgtgcgtggcggggatatctgcggggccatgtcgtcggcttgacgggctcgacgggcaagaccaccacgaaaaaccttgtgcgagacgtgctgtcggcgtcgttttcggtagtggccacccaggcgaaccagaacaacgaactcggcgttcccaaaacgctcttatccgccgaccccgagaccgaggtcgtggtgatcgagatgggcatgcgcggcttgggccagatcgcggatctctgtgatttcgtgaagcccgatatggggcttatcaccaacatcggtgaaagccacatcgagcttctcggcagccgcgagaacatcgcccgcgcgaaagccgagctcatcgaggctcttcccgacggatacggctgcgcattcgtcaattcgagcgatgcgtacacgccgctcgtgcttgagtgttcgaaagccatcgagcgctctgtcggcatctggttctacgatggttcggcgcgcgacgtcgataccgcagccgatgcctacgcaaccgacgtcgaactcgattcggagggcagacccggtttcgtgctgcacgtcgcaggggacgaggccgtttgcaagctcaacctgcgaggtttgcacaacgtgcagaacgccaccgccgccgcgagcgtaggcgcgcgtttggggatggatgcggcgacgatcgcctccgcccttgcatcggcgcagccggaggccggcagacagcacgtgatacaggcccgagcgggcttcaccatcgtcgacgatgcgtacaacgccaaccccgattccatgcgcgcatcgcttgccatgttctcgtcgctcgccgtgcagggcaagcgcgtcgccgtgctcggcgacatgggagagctcggtgatcacgccgttgcctgccatgagggcatcgggcgtgctgctgccgcttcgaatctggattaccttgtatgcacaggagagctttcggctcacattgcgcgcgctgcgcgcgaggcgggcatggatgcagataccgtattggaaaccgattccatccccggcgttctcggggagttggacaacctgctcgagccaggggacgcggtgcttgtcaaggcatcgcacttcatgggtttggagcgcgttgtcggggggcttgtgaactgacatgttttcgattttttcgcaatatccgacgtttctcgtcttcttgtccatcgtgatcgcgatcgtcatcacgattgcgctcatgcccgtttggatccgcttcctcaagtccagccacatcggacagcaggtgagggccgatggtcccgaaagccatctcgtgaagcagggcacgcccaccatgggcggcgtcatcatgctcgtggccgtggtcgttgcggccgtgcttgtgggcaagcccacacccgagacgttcgtgctgctgggggcaacggtgctcaccggattcttgggtttgatcgacgacgggtcgaaagtggtgaaagagcgctctctcggcctcacgccgaaggcgaagctcgtcgggcagttcgccatcgcctcggtgttctgccttgtggctgtgaacctgcttggcgtggctccgaccgtcgagatcccgttcgtctacacgttcgatttcggcatgctcaccaccgtcgtgcccatcggcgacggcatcgccatcccatggctctacctcatcttcgtgaacatcctgctcgtcggcatgtgcaatgcggtgaacctcaccgatggcctcgacgggctcgcatcgggtacggtcatgatcgtcatgatcgtcatggccgccatcgcgtaccgctccgatatgctcgagcctgcgatcttcgccgcagcgctcgccggcgcgtgcatcggttttctgtggttcaattcgcatccggccgacatcttcatgggcgacacgggatcgctcgctctcggcatggcgctcggctgccttgcggtcgtgaccaaaaccgagttcgtctcgctcatcatcggcggcctgttcgtggccgaagccgtgtcggtcatgatccaggtcttctactacaagaaaacgaagaagcgcttcttcctcatggcgccgctgcatcatcacttcgagaagaagggatggagcgaaaccaaggtggtcgtgcgcttctggatcatatcgggcgtgctcgccgcgttcggcttctccatctacttcgcccaatctcttgtgggggcggtctaggtgagcggcgtgccgaacatcgatccctcgaagaaacacgccccgagccatctcgggcgcgtgcttgttttggggcttggaaaaagcggcaaggctgcaacgacgtatttggcagggctcgtcggctcgcgcgtcgagagcgtgacggtggctgcgggcgacaaaaccgacgacgcctgctcctttgcggaagccgtgcaggctgagggcgtccgcgtgctgttcgaccatcgcgaaatcgaagaagcctatgacttgtgcatcgcctcgcccggcatctcgcagttttcggacttctatcgaagcgcagccgctgcgagcggcgagatcatcagcgaggtcgagcttgcatggcgcgaaagccccgccggctcccgctgggtggcggttacgggcacgaacgggaaaaccaccacaacggcacttgtcgcccatgtgcttcgctgcgcgggcgtcgcggccaaagccgtcggcaacatcggcgatacgtgcctggaggccgtcgccgaaggcggcgtcagcgtgttcgtcgccgaaacatcatcctaccagctggcttcgacgaccctgttcgctcccgatgtggccgtcgtgctcaacatcacacccgatcatctagcttggcaccgctcgtttgaaaactaccgcgacgccaagttcaaagtgcttgcgaacctgggccgtcgcgatggctccttcgccgtgttcgatgccaccgatgccgtcgtgcgcgaagaggtgaagcgcgtgcgtgccttgggtgccgagcgcgggtactcgtatgtgcccatcggcacgaaggccggccttgccgggaacatgcgcgaggcgtgcggcagcgaaaacgcagcttatctcgacggcgacacgttgacggtcgatttcggcggcagcgtcgaagcgctcgtttccatcagcgagcttcagctcaagggaatccataacgcatcgaacgcgcttgcggcggcaagcgccgctttggcgctcggcgtcgatgcgcgcgatgtgcgcgagggcttgcggagctttgcgcccctcgagcatcgcatagagccctgcgggaacatcgggggcgtcgcccttttcaacgattcgaaggcgacgaacgtcgatgcgacgcttcatgccctcgatgcgttcggctccgtgaagcccatcgtgcttttgggcggcgacgacaagggcaccgacctgtcggggctcgttgcggcggcgaatgcgcattgcaaagccgtggtgtgcttcggcgctgccgggccgcgctttgccgaagcgttctcgcggggggagattcccgtataccatgcgccaacgctcgagccggctctcgatgcggcgcttgtcgcagccgaacccggcgatgcggtggtgctttcgccggcatgcgcttcgttcgatgaattcacctcgttcgagcatcgcgggcgggtgttcaaagaactcgtcggcagacgggccgtgcagaagggcgctgattagaaacatggcgcgcagggctcaaaacacaccatcaacctactcgagtaagccctcatcatcacagcgatcgggaagctcggcgccttcgcatatcctggggcctcgcatcatgctgctcatgtcggtgttcgctctgctgctgatggggcttgtcatggtgtactcggcaggatcgatcgaggcgatcagcgagggcggcacgccgacggcatacctcgtcaagcagctcggcttcgcggccatcggctgcttcggcgcgttcgtgctgtggaaattcgttccgtaccacgtgtggtcgggcggttttctgtgggtcgcctggatcggcgcggtggtgcttttgctgctgacggcgttcgtgggaacggaaggcctcggcgcgcagcggtggctctacctcggcccgatcggcatccagccctccgagttcgcgaaaatcgtgttcgtgctgatgatggcgcgcatcctgttcgatttccgcaacggatacctcgatgtcagaaacctgttcgtgcagattgcactccttatcgtcgtgccgttgcttctcatttacaaaacccaatccgacctgggaaccacgatcatctgcttcgtgggtatcctcaccgtgctctggataggggaggttcccctgcgaacgatcgccctgctcgtgctcggcggccttgcattcgcggccctcgcatccatggtgggctaccgtcaggatcgtttcgtgtttatgaacccgtgggacgacggcgagggcggctacggcaacggctaccagctcatccactcgttttacgcattcgccgaaggcgggctgttcggcgtgggcctcggcaattcgcgcgagaagttcctctatcttcccgaagccgaaaccgatttcatctatgccatcatcggcgaggagctcgggctcatcggcgctgtggttgtgatcgcgctgttcttgctgttcctctacgccggcatccgcattgcgcggtcggcccccgataacttcggcgctatggtcgcggggtcgatcacgatcatgatcgtgttccaggcgtttctcaacatcggctgcgttctcggactgtttccgacgacgggcaagcccctgccgttcatctcttcggggggttcgtcgctcattgcgagtttgctgatggtgggcttggtgctttcggtttcccagcattccgaggtgccgagcgtctacgatcgcaggcgtcaggacctgcgggtcgtgcgctcgtccttttcgggtcccccgcctgccgctcgcggcggatcggctccgaagcgggaccgatcggggccgtcgacgacgcgcggcaaggcgggttcaagcaggaagagggcgaggaggtaggctatggtcatcgtattatcgggcgggggaaccgcagggcacatcaaccctgcattggccgtcgccgaagtgctcgaatcgcgcggccacacggtgctgttcgcgggaacgccgcagggcgtcgaggctcgactcgtgcgcgaagcgggcataccgttcaccgcgttcgaagctgcggggttcgatcggagccatccggcgagcatcatcggggccgtcgccaagatactgaagagcacgcgcgctgcgaagaagtggtttgccgatgtgaagcccgatgtcgtggtgggattcggaggctacgtctcgattcccgtgggccgcgccgccgagatgctgaacattcccgttgtcgtgcacgagcagaactcggtcatgggcatggcgaacaaatacctcggcaagcgcgcccgcgccgttgccctcacctacgaggtggcggcctcggcgctcgaagacgcgtcgagggtcgtcgtgacgggcaatcccgttcgcgcatcggtgctcgccgccaagcgctcggacggccgcgagatgctcggcatacccgaagacgccctgatgctgctcgtattcgggggaagcctcggcgcacgccacatcaacacggccgtatgcgcgctcaaagaacggctgcttgcggtcgagaacctgtacgtcgtgcatgttacggggccgaaggagctcgaggcggtcgaggcaaaactcgccctgagcgacgaagagaagaggcgctggatgcttttcggctaccaggatcgcatgggcgagacgcttgccgcgtgcgatatggtggtatcgcgcgcgggggcaacctcgctcgccgagatatcggcgcttcacatacccgccatgctcgtgccgttccccttcgccaccgaagatcaccagaccaccaacgcgaaggcctacgttgcggggaaggcagcctacatgctgcccgacgaccaggtcgagggcgaccggttcgccgagcttttgttttccatgatagaagacgaagcggtgcgcgagcgcatgcgcgaggcctcgaaggcattcaagacgaaggacgccgccacgagattggcagatgttgtgatcgctgcggctgagaagcgctagcggcgatacaatgccaacggcaggattgcgccgaggacggacaagccgcggcgcctgcgggcatcaccatacgaaaggtataccgaaacgaccatgacagataagcgcatcgaatcagttcacttcatcggaatcggcggcgtcggcatgagcggcatcgcgcgcgtggcgcacgaccagggcatgaccgtcaccggatcggatcttaaggaaagccgctacaccaagcagctgaaggaagccggcgtcggcgtgtgcatcggccacggagccgagaacattcccgcgaaggatcccgacgtggtggtggtgtcgacggccatcctcgacaacaaccccgaatacatcgcggcgcaaaagcggggattgaccatctggcatcgtgcgaagatgctcgctgcgcttggcgtgggcaagcagacgcttgcggttgccggaacccacggcaagacgacgacttcctcgatgctcgcaagcatgctcgatgcgatggggcaggatccgagcttcctcatcggcggcatcgtgcgcgcctacgggacgaacgcccactcgggcaacggctcttactacgtcgtcgaggcggacgagagcgacaagtcgttcacctacctcgacccccgcgcggtgctcgtcacgaacatcgaggccgaccatctcgatcactacagcggcatcgaagaaatctacggcttgttcggccagttcatcggatccgttcccgaagacggcgtatgcgttgcgtgcggcgaggatgccgagcttgtgcgcatcgcccgcgaaacgggaagaaccgtctacacctacgggttcggcgagcaatgcgatatccgcatatcgaactacgagccatgcggcatcggaagcgatttcacggtgacgtttcccgatggcacggcggcagccggccatatcaagcagaatcccggagagcacaacgtgctcaacggcgcaggcgtgctcgccttggcgtgggcgctcgggatgccggtcgatgcggccgctgccgcccttgcgcagttctcgggcgtgcggcgccggttcgatttggtaggggaggccggcggcgttaccgtgatcgacgattatgcgcatcatcccaccgagatcgcagctaccatccaggcggcaaaaaaacttgacttcaaacacgtgcacgtgctgttccagccccatcggtattcgcgcgtgccgttgttcaccgaagtgctgaaagacgagttcggtgcggcgttcgatgccgccgattccgttacgttcatggatgtgtaccctgcaggcgagacgcccgttcccggcgtatcgggcaagacgtttctcgatgtcgttctcgatcatgcgggccaccccgacgccgcctacgtgccgcgcaggatcgaagtggttccctatatggcttcgaaggcggcgccgggcgatctcgtcatcacgatgggtgcgggcgatgtgacggccatcggcccccagcttgccgctgcccttgaagagcgcagccgggttgccggctgcaacgcgtaggcgggtgccgggatgactgcgcgccatacgtccgcactcgaggccttgctcgtcgaccagtccttcgacggcgatatctatccgggcgaaccgctcgcccgccataccacctatcatatcggcggtcctgcgcgcttctacgtgtgcgtatcttcgctctccgcgctctcgcagctcgtcaagacgtgcgatgcgagcgacgtcgagtggatcgcaatggggaagggaagcaatctgctcgtttccgacgaggggttcgacggcgtcgcctttacgctcgggcaggatttcaagacatgccgcttcgacgaggagcactcatcgttttcggtcggcgcgggcgttcctctgtcttcggtcgtgcaggatgcgttcaagcggggccttgcgggcctcgagttcgctgtcggcactccgggcaccatcgggggcgcggttcgcatgaacgccggatcccgcgacgaatggatcggttcgcgcatcgtctcggtcacgacgttttcgccggcctgcgggctgaagcgctatgcgggcgccgatatcgaatgggggtatcgaagctgctcgattcccgtcgacgagatcgtcctcgaatgcgagctttcggtgcagagcgcgttgccctcgttcattcgtgggaaaatggaagccgcgcttgcgaagcgcaagaaatcccaaccgctcaacctcgcttcgtgcggcagcgtgttcaagaacccggacgggcgatcggcaggcgcgctcatcgaagaggcgggactgaagggcgagcgcaggggcggtgcgcagatatcggacaagcatgcgaacttcatcgtgaacgtcggcaatgcgacggcgcgtgatgtgatggagctcatcgaacttgcacgtaccaaggtgaaagaagcttatggcatcgaattacaaccggaagtccgcttcctcgggttctcgtaggaagcccacgacgcgcagcggcgcttcggcgtaccagcccgcgcgcggcgcttcccgccagaaacctcgaagccagactgctcgcagccgcaacggagcctcgcgtacccgccagtcgggcggcgcgggcgcgccccaaggctatcggcaggtgacttcggtccgcatcggagacatggatcaggccgaccgtgcgaggcgcgctcagcggacgtaccgccgctatctcatccgcatcggcctcgttgtcgcgcttgtcggcgcgctcgtcatcggcggcgtcgtcgtgtacaactcgaacctgttcaccataacgaacgtgcgcgtgaccggcgtcgagcatttgactgcaaccgagatgaccgagctcgcctcggttcccgagggcacgacgcttctgcgcgtcgatgcgggaggcatccagcagcgcctgctcggcgaagcgtgggtgcaagaggcttcggtcaaccgcgtgtttcccgatacgctcgagcttgccatcaccgagaagaccatcgcagctgtggtgagcgtgcccatcgacagcgcccagacgactgaagattgggccatcgcatcggatggcacctggcttatggccatccccgagaaggggtcggacgcttcgaagaccatcagccagaaagtttacgaagatgctgaaaacgtgctgcatatatcggatgtgccgctcggcgtgacgcccgaggtgggcgcccattgcaccgacgccaacgtgaacaacgcgctcgatatcgtgagcgggctcaccaccgacctggccgatcaggtgaagtcggtgaaggcgaccgaaacggcctcgacgacgctcacgcttgagaacggcatcgagatatcgttcggcgaagcgggaacgaccgaggagatccgcaacaaagagcgggttatcctgcagcttatggaggaaaaccccggcacaatcgcctacatcaacgtgcgcgtggtcgaccggcctacgtggcgatcgctgtaaatcgaggccatcgcctcgattttcgttgcgggcgcctcgcttcgaatggttgagtctcgcggcggcgtgaaaccgcgcttctgggtgcgccctcggttgctgcctgggacccgggcttctcttcgattgcacctatgcgccggtagcgtgcagtggtatgctaacaagcatggacactaaaatctattttccgccattgcgcctttgcggtcaggctttcctgttcgcttggcgcatggggttgttcttttcccccgtagtcgtttcctttgcccctcatccagcgcagtatcttatcgtcggtcgcgtggcatttttgattgccttcgcttcggctctcatgggtgtgtttctccttgcccgccatcgatccagggctctttctgaccgagctctgacgatatggggctcgctgcttgcagcgggaggttccgcgctcgtcatcgcatcctcttttgcaaatggaccgtttttcgcgctttcgatcgccgggtttgcggtggcgggtatcggagacgctttcattacgctcgcttgcgcgaagctatacagcacgttgagcgttcgtttgagcatgcgcgtggttcccgtggcaatggctgtagcagccatcatctatgccgttgtcgcgaacaacgcttcggtcgttgcggtggggattctcgttgcgcttcccctagcttgcggcgtggtgcttttaggcgaattgggcggtgaaaggcatttcgaaaccgctgaaaagccgacgatttcccagatcgacgagcgggctagcggctcttttaccaaatggaagatatcgagctacacgtcagtgctctggctgtctttcggggtcatgtggccccttgctgcggtgcgcatgttcgaggatggatcgttgttcctcccgttctccttgtcggttgccgcactgatagctattgtttctttcgcggtggcggcgttcacctatctcctgaagattcccacggtcaaaatcttctggatattcgtccccctgatgtttgccggcatcaccgtggtcgcagtggttgattccaacatccaagtgcttgccttcgcaatgatctttgcagctcacaacattgcggaaatccagcttataacccatttttcagccatttgccgccgccgcggctattcgacgaaaatgcttttcggatgcgggttttctattctgagcgtcggggagctgcttggtattttgattggcgctgctatgatacccgtgcagtctgccttgcttacgatggctttgctcgtatgtgcaaatgccatcgttatcgttgtcatattctcaattgttcgggtgaatgcgacctttcagagggcagagttgaaagcggctctctcgaagcatgcgctcgagtctttgctggtcgagaatggaggctcggcgtcgggcaatcaggctgcgaaccgcgataccgatgccatcgtgaagatgtgggccgatcggtacggcctttccgctcgcgaaagggagatcgccaatcttgttttgctcgggcgcaacgtgccggctatcgctgagctgcttgtaattagccaaagcacggtgcaaacgcacgtgaagcatatctacgagaaaaccggtgtccattctcgccaggagcttgttgacctccgagatgaataccaagctcaatagctatctgaacagggattataataacgtatcccctagtttttaggatggaagcctcctgttgtcattgacataaatcccgcaatcgccatgatgtgcatggtaggtaaaatcacgatactcctcttgcgtcgtcgggcagtgaagcgctctgcgatatccatgttgtgctgaacaagaggaggagaagtgggagtaatccatcgcaatgacaagacggtgcccttattcgagaaaaacaatgctatgagccgtcgcggttttttgaaggggtcggtactcgcggggcttgccgtgggcacctctacgggaggcttgatcgcctgtgcaccgaagcagaacgcctctaaacctgctggcgaaagcgagggggcgacggttgccggctatcactacgaggctgaagccgccgagggcacgtggcatcatagcgcctgttcacgcaactgcttcgatacgtgcatgatcatgagcaaggttgtcgatggacgtcttgtgcaggtgtgcggcgacaaaggcaatccctatacggccggcggcctgtgcgtaaaaacccagaactacgtcgattatgtttaccgcgaggatcgcatcctgtatccgatgaaacgcacgggcaagaaaggtcctggttgtacattcgagcgcatcagttgggacgaggcggttcagaccatcaccgatacctggaagcagatcattgccgaaagcggtggggaggcgatcacgtggtttcgctaccaggggaaccaaggcgccattcatcgacgctgcctcgagcccttgttcttcaaaatgggagctacgtatcatgaggcgagcttgtgcaacaacggctacgtgttttcgctgccttatacaaccggctccataaccgtcatgcgcgctgaggatatcgccaacaaggacctctacgtctcctggtcgcataatccagcggcgggcagcttgcataccatgaaattcatcaaggagatgcataaggcgggcggtgcgatcatagtggtgaaccccatgcgcgttcccgagtgcgagtgggccgatctgttcgtccagctgcttcctgggactgatggggcttttgccatgggcgtcggaaaataccttatcgacaacgctatggtcgatgagtctttcatcgaagagtggtccatcggctatgaggactatgcggcctcggttgccgaatggactgccgacagggtggcggaggagtgcggtattcctgccgagcaggttgctcagttcgctgagcttctatggaaaaaccgaaccagtacctgcttgaagacaggcttgcagatgggacgtcgcaataacggcggaatgagccatatctcaatcaagctgcttacgggcctgatcggccatcccgaatgctatttcaatatgaccagctcgggcggctacggggtgaacagtgccgccaatctcgatatgttcaccgagaccgtgccctccgaagcctcgagtgcttccaccatccgcaactactcgtcacctgcgctcggcaaagtgcttacgggcgagaattacggtgaggggcatgatttctcaaccaatcccattcgctccatcatgatcttcggaagcaaccccatggtttccaatccgaaccagaatctggtacggcgaggcctcgagcgtgaggatttgttcactgtcgtacacgatatattcgttacccctacggttgaatacgccgatatcgtgctacctgccccaacgttcttcgagtacgaggaattcaacggtggctacggccataattacgactgttacaatgagcaggtgatcgagccgctcggcgaatctatgaacaatctcgatctgtgcaacctcctgggtcaggccatgggttacgacgacgatgtgttcaagcgcaccaacgaagacatgcgctcgatgtttctcgatggccagaagtacacgtacgaagagctggttgaaaaaggttggttcgacgttgaacccaaaacatgggaagctcagctggaaagcggttttgccacgccctccaaaaaattccaattcgcaagcgatgagcttttggccgatcacggcacgcgcacggtggtctactcaccggaccccgaagggaagacgggatcccctgatctgtttgccaggtatcccatcgctctggtgagtcccagcgcaaaggagtttctgaacggcgtgttcggcaacatggaggataacaacatcctgttcggcgaaagctacgtgtatttgaacgagggtgacgcccaggatcgcggaatcgcagatggcgacgatgtcgtcgtgtcgaacgaccgggggagcattcgtcgtatcgcccgcgtggtcgagggcgttatggcgccgggtaccgcttgtacctacaagagcacctggtcgaccgtaactggcgtggaaaacgtgaactgtgtaaccgctgattctcaagctgacttcggccggggcgtcgcctaccagagctgcctggttgacatcgtcaaggcctaaccgccattcgttgaaaggaacataatatgagtcaaatgggatttctgctcgatcagaaatactgcatcggatgccagacctgccaagccgcttgtcgcgcccgtcacggtctgacccctggagtttaccctcgcaaggcaaccagctcccagatcgagctgaccggtccgtacatctcccttgcctgcaaccattgcaccaatcctgcctgtgctgacgtatgcccaactggtgcggtgcaaaaacgtgacgacggtatcgtcgtgcatgatcccgaaatctgcataggctgttattcctgcgagaaggcctgtccgtacggtgcgcccttggagaacgatctgaacgatcgcatggtgaagtgcgatatgtgcgcagcccggcttgacaggggcgagaaccctgcgtgcgtcgacgcctgccctgtgaaggtcctcaccgtaggcgtcgtagaggatcttgaggcgcaagggggagttcccgagggcgtcggatttaccgtcgagccgacgggacccaatatgcgtttcatccccattgcctaaacgatttgcaaggagaccggccatgacttccgttgaaagagatattccgacagagagtgccgatcgcgcacggtggagatcggctctttaccggctggcctcctttgcatttctcgtcgaacctactgacgagcggttgcgcgaacaggttgcagctgcatgctccgcgctgcgtgacggtgacgggtggattcttccctgcgagtgcgatatcctggctcacttggcggctttggatgcaagcgatccaaggcttggaaccagggtccgcaacgaatatgcagagctcttcgtggggcctcgtcctccccgggctccgctgtacgaatccatctacgttgggcatccccgtcggcttatgactgaaacgacgcttcatgtgcgtgaggcgtacgagcgcgttggctttgcggttgaaaggcgcaacaagatacccgatgatcatattggctacgaactggagttcatggcgagcctttgcgctcgcgaagcctgcgcaatcgaggagagctgcgttggcgatgttgtttcggctcagcttgcccaagggctgttccttcgcgagcacttatcagtatggtccgggcttttccatgagcgcgttgcgcaggcgggtggcgaatactatcacgggtggtctcgattcgtacgcgatttggtggcagaggacgtcgcacatgcggttgacgggggaggatacggtttctgtgatgcggccgaggagaggggcgaaaggttgtgaggggagggtcgtttgcatgcaaagcggtccaggtgataggactcgccgctgtccttttggcgtttggtttgataactcgtcctttggcaaaattactgcccgaattgtacggcttccacgctgtcctgatggcttttccgacgtcatttgcgacggctgcttttctagggaggggcgcgggtttcgcggcttgcctcggctccttcgccctgttctccctcgttctctttgcgatgagccccgttatgggtctgtctgcgtttgcgccgatagcggcagcggcattggtgcgtgtggctgccgtaaggctctctggagaagcaaagggattgctgacggggcttgtttgcggagccctgtattatccctgcacgcttgcgtttttggcggtgctgggtggggccgtcttcgttttctcgggtggtgctctggtgaaattgattgtttcgacgctgctgggtgctgctttggctgcttttggtgcgctgttggcggcaggggcgttctcgcacggagaaggtgattagtggtggttgttcttctgtctcttgctatcgctgcggttttaactgctgcgtttcgggttccgcttgtccgctggccgggagcttgctacgcggttgcgatcattgtcgtcgtcgcgtttctcggcggcgctctgcccgctggcatcgaacggggaatgcttccgcttttgcggcgctgtacgcttccttacggattgttcgtcatcgtgatgtacataggcgtgcttccttctgggtcgcgtttgcgaacgtgtctcaagccggttcgcggcccgctttccatcgttgcatcgctgctcgtcctcgctcatgtcggcagctatgttcaggtgtatcttggcatggcgctttctggcttcgtcacggctgcagcgccgacggcgacatcgctaattatcgcttgcgttctcgtcattctgctcgccgtccttgccgtgacgtcactgcagtcggtgcgccgccgtatgcatggtggatcctggaagcgacttcaaagacttgcgtatccatttttcattcttgtatcggtgcatgcatccgtccttctctttccctcggctgcaacgggttcgggttccttgttggcgattttgttctacactggcattgctctgttgtacggggttcttcgcgtcggtcgatggctttcggggcggtcgagcgagccaaaggcatcgcgggcggtgaccgcttcgtcgaagttgtaggcgaaagcgtccgtttcgaaaagctttcgctccttcagcggctgcacctgcggtattcgcgttttcgcgtgatggattaccgttttttgacgtatctgttgtttcaccgtgctgtaatttgcaattgcagtatcatcgtgtacaataacgccacgttcaaaaacgtacgtatacgcaggaaaacgcagcatttgaaaacgcagcatatgtggggagtataggatgccaaacataataggtcccgagcatttggcggtcatcaaggtagttggtgttggtggcggcggcacgaatgcagtcaatcgcatggtcgaggctggcattaagggcgttgagctcatcgccgttaacaccgatcgtcaggccttgctcatgtccgatgccgacaagacgatccacatcggcgaagaacttactcgtggcctgggtgcgggagccaatcccgaggtcggctgccaagcggccgaagagagccgcgcggagatccgcgaagctcttgccgaagccgacatggtgttcgtcaccgcaggcgaaggcggcggaacgggtacgggagccgctccgatcgtagctgaaatcgcgcgcgaggaaataggcgcgcttaccgtgggcatcgtgacgaagcccttttcgtttgaaggccgtttgcgtcgcaaccaggccgatcagggcatcgatcttctgtcgcagaaagtcgatacgctcatcgtcattccgaacgatcgtctgctcgagatcgtcgagaagaaaaccaccatgctcgacgcgttccgcatcgccgatgatacgctgcgccagggcatccagggcgtgaccgaccttatcaccattcccggtctcatcaacctcgacttcgcggacatccgcaccgtcatgaaggacgcgggtacagccttgatgggcatcggccgcgcatcgggcgagagccgtgcgctcgacgccgcacagcaggccacgaattccaagctgctcgagtcttcgatctcgggtgcttcgcgcgtgctgttctcgattgcaggcggtcccgacctcacgctgaccgaggtcgacgaagcggcccgtacggtcgaatcgtgtgccgacgaaagcgccaacatcatctacggccagatcatcgacgagtcgctcggcgacgaggtgcgcatcaccgtcatcgcaacgggtttcaagcagggtgcgtcccagtcttcgatggacttctcccgcaaagacctgttcgcatcgacgacgcaggcggctcccgatcctgcccctcaacctgcttcgctcaatttctcgaatagcccgaatggccgcttcgccgacgaggattacattcccgattttctgaagcgccagcgttaagccgcataatcggttttcgcgaaccatggaaacgacccttgaactgccattgccgcatctgtccaggggtcgttttgcgtctatcggggcattgaccgacgaggcgcttttcgatcgcacgggcattcgcatcgcattcactgagcggataggcggcgtgagcgaagggccgttcgcatcgctcaacctaggcgatcatgtgaacgacgacgcggcttgcgttgcgcgcaaccgtgcgatcgtggccgaggctttcggtgtcgggcccgatagccttgtcgtgccgcatcaggttcatggtggcgccatcgtgcgcgttgcggactcttctgccgaggccgtttgccgggcaaaggacgaggccgaaacgggggccgatgcgctcctgatcgaggtgtccgacgttgccgcgcttttgtgctacgccgattgcgtgccggtcatcgctgtatcgccaagcgggcgtttcgcggtgatccatgctggctggagaggcgttttagccggtatcgcggaagatgcggttcggctgctcgcgagccttgatcgcgatgatggatgcggggttgccgagggttccatgaacgtctacatcggcccccatattcgccgcgaatgcttcgagaccggcgaggatgtgcgcgatcggttcgtcggccgtttcggtgcggcctgcgctcccgatcgaaaccacgtcgatctctctgcggcgcttcgcacaggccttcacagcgtcggaatcgagcgtatcgtcgatgcagacgcgtgcacggtatgtgaaaacgatcggttcttctcgcatcgcgcccagggcggcatagccgggcggcatggtgcgttcgcggttcgaaagggatgaggaaagtgagcattcagacacgctacgaacggttagccgccgaaatcgaatcggtttgccgcgaggcggggcgcgatcccgacgaggtggtgttcgtggcagtttcgaagacggtgggtcccggcaaggtggcgcaggccgcagcggcgggcgcgtgcaacttcggagagaacagacccgagggcctgcttgaaaaacagccgttgttttccgatgccgcatggcatttcatcggaaacatccaatcgcggcgcatcggcgatatcgtagctcatgccgatatcgtgcattcgctgtaccagcagcgacatgccgataagatcgatgcggccgcacgggcggccggcaaggtgcaggatgtgcttctcgaggtgaacgtatcgggcgaggcgagcaagagcggccttgcgcccgatgccgtggaaccgatgctcgctcactgcctcgcgcttcccggccttcgcgtccgcggtctcatgacgatggcgccgcagggcgaccttcagcgcgcgaaggcgagtttcggggggctgcgcgaactgcgcgacaggctcaaatccgcacatcccgagtgcgatgaccccgcattcatgcatgatctttctatgggaatgagcgaagactggcgcgagggcatagccgcgggcgctaccatagtccgaatcgggagagcagttttcgatgatgccttcgaatgaacgggcatttcgcaatagaagcaagacgccggacacgcagcatccggccgaaacgaagcaggtgatacgatggaactgccaaggatagggaagtccgacgggggaatgctcagcgggatcaagagcaagctcggcctcggcgataagaacgacggtgcctacgacgacgaatactacgacgattacaatgacgattacggcgagggctacgaagaggactacggcgaatacggcagcgattatgccgacgattacggctacgatgaccgcgcatcggctcgatcttctcgttcgggcgctcacagcgcctcttctccgcgcctcgtctcgatcgacgatgtgcgtgcgaacacgcaggtgcccgaaagcctgaagcgcgatccgcttccgcctcggcacgccacgtcgccttcttcggcatacggagcgggatcttcttcctacagcacgccttcgggttcgggttatcgttcgagcttcggctcgtctcgccaagtcgagcgtgcggccgattatcttcgaagcaccgagaccagcgatctgccttcgggctcccagcgttccgagggcttgaactcgctgttcacctctaccgctacggcgtcgagcgccgcttcgacgacggctggctcgtctgcttcttcgtcttctgcctacgatccgtacgaggcgtatgcgggatcgggagcctcctcgcataacccgacccgttcgctcagcgtcctcaaacccgcgagctacggcgaggtggaacgcgttgccaagatcgtgaaggcgggcgatgtggtcgtgctttcgctgcgcaacacacccgaccacctggccaagcgcattctcgatttctccttcggcgtgtcgagcgccctggatgcgagcgtcgaatgcgtggccgacaaggttttcgtgatcctgcgcggcagcgcgctttcgaacgacgagctcatgagcttgcgcaatcagggcgtgctgtgatggcgaagctttcgcaagatacgcgcatcgcccttatcgggggcggcaagatgggcgaagcgatcatgggcggttggatcgcgtcggacgaagcccccgcgagcgtgctttctgcggcgaacttcatcgtggcgaaccctggattgccgcgccgcgagtacctcgagcgaacctacggtgtcgcgtgcgtcgaacaggcgaccgatatcgatgcggccgacatcgttgtcttggcggtaaaaccccaagtgatgatgggcatgctcgaaacgattgccaacgaggcccgattcggggagtgcctgttcgtatccatagccgccggcatgacgaccgagcggctgctgggtgcgcttccgccgggtgcgcaccttgtgcgcacgatgccgaacacgccgttgctcgtgggtgcgggcgcgacgaccgtctgcggttcgtcaagcgccagcgtcgaagacgtcgagctggtgcgggcgctgttctcgtgtcttggagccgccttcgtcatcgaagaggccgacatggatgcgacgggggctatctcgggatcggggccggcttacgtggcggctatgatcgaggcgcttaccgcagcgggtgcgcgcgaggggctgagcgccgatctggccgagcggctcgccgtgcagaccgtgtacggcaccgccgagcttatccgaaagacgggccaaacgcccgaacagacgcgccttgccgtttgcagcccgggcggatcgacgctcgcggccttggcggcaatgggcgaagcggggctttcccgcgcttacgaggctggcgttgctgccgccgtacaacgatctaaggagttaggtgcatgttgagcttcaagtacctgatagcatcgctggccgatgtgtacagcatgatcatcttcgtgtacgtgctcatgtcgtggataccgactaagcggggcatcttggctgacatcgataacgtactcgcgaaaatatgcgatccgtatctgaaccttttcaggaaatttatacctccccttggaggaatggtggacgttagccccataattgcactgcttgtattacaatttggagtacgtttgatcttgagcatcttttagggtattaccatatgttcgcaaggacaaaatgaagggaaatcgcaatggctatgacttcggctgatattcagaatcagagcttctccatagaccgcaagggctacgacgtcgacgaggttgacgtatttctcgagcatgtcgcgaacgaactcgacgagatgaacgccttcatcgaccagctgcagggcgaacttgacgataacaagttcggtgggttcgatcgtccggctcgcaacgtcgctgccgcatcgaatgacgagcttgccgagaaggatgcccgcatagcggagctcgagcgccagctggaggagaagaaggccgacggcaacgccatcgcccaggctctcatcatcgcccagcgctccggtgacgagatcattgcaaccgccaatgccgaggctgcgcaaacccgtgccgaagccgaggaagaggctcagcgcattctcgataaggcgaacaacgaaaagcagaagatcatggacgctatcaaagatctcgaagaggatcgcgaagacgtccgcggcgaatatcaggatcttctcaaagacttcatcgaatccgcgagcaagaagctcgtcgaaatcggcggacccgctcccgcgcccgttgcgagtgcccatgccaaatcggcaagccgttcggctaccaaggctcaggcgcccatccgtaaggaggcaaccgctaccgcagccgcctacaccacgcctgccgcaagcgcctcttcggtcgtcgttcccaccacccccaagccctcgcgggttgagaaggacctctctggattcggcgatgccgacgacggtttcgagttcgaggaaatcgactagttggaacatgctcggcgaatgccgatacggtaaacgaacatgtgacgcgggcttcggcccgcgttttttgtttcgatggttggcgggctctcgccgataggggttttccttcggttgggcggtggtttcctctatctttttgtacgaaagttctgaagctggaaaaaacgtattgacgatgacgtagcgtcatcacgtatcgttcagtgctgttcgggtgctgcccttgcgattgggtcgcaccccgcatgctaagatgagattgccaaggcgaaacgcgatcgcgttcgccgaacgtaggagaacagatgaccgatccggcatatctgacggtaggggatcttgcgcgccgcgtgggggttaccgtgcgcacgatccagtactacgatcaacagggccttttatcgccgtcggcgaaggggccgcagaaccagcgtctctacaccgaggagaacgtacaagatctgtaccgcattctgactctgaaatacctagggctttccctttcggagatcaaatccgatgcaggccttttccgcgacgcctcggcgttccatgcgctggcggatcggaagatggacgatatcgagaaagatttccaggatttgttcaagcgcctgacaacgatgcgcgcgctgctcgaggcatccaacgaacccgatgaggtcgattgggcaaccatggcggcaaccatcgagcgcagccaggacgacagccagtttttctggcggcttacctgcatcaacgaaagcggactcaccgaggcgaccgacgaggacatcgccttgcgcgggcagtccgtttcgaaatggcacgagcttatcgctgataccatcaggcagatgtcggaaggcgagccgctcgacagtcccggcaaccgcgatcttgcgcgccgctatctcgaactcgacgaatcccagcaaacgctttcggctaaccagaacttcatcctcatggagaacatctcgccgcatcacgggcgcgcacacggccatcatggcgaagacggctcgttcgacgagcttcgccaatcagtgtgcgaccacctcgatgcggtcgtggcatcgtaccagcaaacggggtagcggattgctcctgcagcaagcacgcggggaagcatccgcaaaataggtaatacattaaataaaaagaagaggacgagagaaaggcacactatgatcgtgtcgtggatgacgacgaaccaatgcaacctcaaatgcgtgcactgctatcaagatgccgaagagcagcaggagcgcgagctttccacagaagagggcatgaagatgatcgacgagatagcgaaggcgggcttcaagatcatgatcttctcgggcggggagccccttttgcgccctgatatcttcgatctggtatcccacgccgcattgcgggggctgcgtccggtattcggcaccaatggcacgctcatcaccgaagagatagcgttgcggctcaaagagtgcggggctatggccatgggcatcagcgtcgatagcctcgatcctgaaaagcacgacaagttcaggggactggaagacgcctacggcctcacgatggccggcatcgaggcctgcaagaaggcggggttgccgtttcagctgcataccacggtggtcgactggaatcgcgacgaagtgtgcgccatcaccgacttcgctcaggaaatcggcgccatcgcccactacatcttcttcctgatccctgtggggcgcggcgtctacattcaggaaacgggcctcgaggtgcttgagaacgaggagctgctgaaagacatcatgctgaaatccgcagaggtttcgatcgatgtgaaaccgacctgcgccccgcaattcacccgggttgccaagcagctcggcgttgagacgcgcttctcgcggggatgtctcgcggggcttacgtattgcgtgatcggatcggagggcatcgtgcgcccctgcgcttacatgaccgaagaggcgggcgacgtgcgcgagacgcccttcgaccggatatgggcatcgagccccgtcttcgagaagctgcgtaccgaagagtacagcggcgcctgcggggcatgcgattacaaacagggctgcggcggatgccgggcgcgcgcggcgtactaccacgacggcgacgtcatggcgcaagacgaatactgcgcccacgggcagaagctcgaagcggcatcgtagccgagtgagaatcgtcgcgctcgcttgcgtgccgtgcgcgatggaaatcgcggcgtacagcgctccgaatgttttcggcagagcgggtacggcatgagactgtttagaaatacagcgttggatggaagggatatgatgatgaaaacgatgaaacgagacgctcgggtgctcttcgcgggattggttgcggcgatcgcccttttcttcggctgcgttgccctgacgggatgctcgtcgcaggagccggcagatacgccggatgctcaaagcggatccgccggctccgatcaggcaggcagccaaaacggaccctgcaccttcaccgatgatacgggtgccgaggtgacggttgacaatcccgagcgcgtggtagcctgcatgggcagcttcgcgaacacgtgggagcttgccggcggaacgctcgtcggcgcatccgacgatgcgttcgaaagctacagcatcacgtcggccgatgcggtgaaagtgggcgatttctcatcgccgaacctcgaatcgatcatcgcgctcgagcccgatttcgtcatcatgacaagcggatcgggcggccgcgggggagattcgagccaagccgatctcaaacagagcctcgaggcatcgggcattcccgtggcgtacttcgaggtgaccacgttcgatgactacttgcgcatgctgcggacgttctgcgacatcaccggccgcgacgatctgtacgagcagaacggccaggcgattgccgatgcgatcgatgagatcaaggcgagcgtgcctgcgggtgaggagccgaccgtgcttgcgatgaccacgttttcgggcggcacccgcgtgcagaattcgtccacgatgaccggcgccatgcttgccgacctcggcgtgaagaaccttgccgacgaaaatcagagtctgctcaaggatttcagcctcgaatcggtcatcgagctcgatcccgatttcatcttcgtcgtgcctatgggcaacgacgatacggcggccctgaagaacctgaccgaggcgactgaggccaaccctgcgtgggcaacgctttccgccgtgaaagacgggcgcttcatcacgcttgaaaaggagctgttcctctacaaacccaacgagcactgggctgaaagctaccagacgttcttcgaccatctgtatgcatagtctctcgctatgaacatgctccctcgcaggcatacaggtgcgtttgcatccgtcgccgtcgctgtcgttcttgcaacggcgacggtggcggcgtttctcgtcggctcgtcttcggtgagccttggcgaccttgtcgcctggatcacgggaggcgatgtgagcgatgcggcgaaaagcattctcgtgaacgtgcggcttcctcgcgtgctcgcggcattgctttccggtgcggcgcttgcagtggccggcgccatcatccaagcggtgctcgacaacccgcttgcaagtcctaacatcatcggcatcaactcgggtgcgggattgttcgtgctgctggcggcctcggtgtttcccgggcttctgtggctgcctccgcttgcggctttcgcaggtgcgcttgtgacggcgctcgtaatcttcggcatttccctcggggcgaacacctcgaggcttacggtggtgcttgcgggcatcgccatcacctcggtgttcggggcgggcatgaacacgatcctcatcgtgaaccccgatgcctacatcggttcgtcgaccttcctcgtcggcgggctcgcgggcgtgctcatgaaggacgtgctctggcctgcgggctacatcgcgatcggcctgcttgcggcgttcggcgcagccggcaagctcaacatcatggtgctcggcgatcagactgcgcactccctcggtatgaacgtcagccgcacgcgcctgctgatgctcggactcgccgcagtgctttcgggcgctgcggtgagctttgccgggctgctcgggttcgtggggctcatcattccgcatctcgtgcggttcttcgtcgggcatgacaatcggctcgttttgccgctctcggcggctgcgggcgcagcgttcgtcgtgttctgcgacatgtgctcccgcgtgctctttgcgccctacgaggtgcccgttggcatactcatggcgtttctcggcgggccgttcttcatctaccttatcctcaagaatcgcaaagggggactcgatgaccgcggttgacattcaggacgtatcgtttgcatatggcaagatgccgtttatcgaaggtctttccgcgacgttcgaggaaggcgccgtcacgagcatcgtcgggccgaacgggtgcggaaaatcaacgctcgtgaagctggtggatgggctgtaccgcccgagttcgggacgcgtgctcgttgagggcaagccgacgctttcgatgcacggcaaggaacgcgcccgtaaagttgcggttcttgcccaggcgtcgcgcccgcccgcgatgacggtcgaatcgctggtggcgtgcgggcgctatccgtatcagtgccatgaaggacgcctcgggcaaaaggatcgggaatatgtggagtcggccatgaaaatggcaggtgtggagcggttcaggagccacgatcttcgtcacctttcgggcggcgagcgccagcgggcgttcatcgccatgacgctcgcgcaggacacgggcatcatcgttctcgacgaaccgacgacctacctcgacatccgtgcctgccacgagaccatgcagctcgttcgctgcctcaacgctcagatgaacaagaccgtgatcatggtgatccacgatctcgacctggcgcttcggtattccgataacctcatggtcatggagcgcggcgtttgctcgtatgcgggtaccgtcgacgaggtgctcgaatcgggcgcgatcgagcacgcgttcggcgtgagcatccatgcgatcgccacaagcgaagggcgctcttacagcctgtttcccgcgtaggcgatcaggttttgtccaagcgggccgactcccgtgcgggcagacccgcctttgcgttctatcgcctgggcatttcgaagccctcgagcgcttggttgctgcccggcgtgtcgagtggccaggtgttgcccgttgcccaagcgaaggtaggatgaccgggtgatacttgccgttcggcgaaggcgggatggcggcatgccgtttgccggtccgtgagggcgacaagaatgaaagcgagtgggccggtaagccgggttctgtcgttggacgatcatttatctgaggcgcatgtcgccatgcgccttaagcacgcaacccgaacgcacggaagggcagccgtatcgcgttcctatttgcgcttgctccagatggggtttaccaagccgcgccgttgccgacgcgctggtgcgctcttaccgcaccgtttcagcttttctgccgttgccgcgcgccgaagcgcgttttcgcggaagagtcttcttttctgtggcactgatccgtcgggtcgccccgcccagccgttagctggcatcttgccctttggagcccggactttcctcacaccaggtgcgcgatcgtctggcccactcaggtatggtattctaccaaatcatcacccgaattaaggcaggaacacatgaatggcaccactctgcaattccgtcaagcaactccagacgatatccccggtattttggagatgatccgcaggcttgcggcctacgagaaggccgaggacgaggtgcgcgcgatgccggagcttttgaacgagtggatgttcgagaaacgtgctgcggaggccgtggttgcggtggctcccgatgcgggaatcgtcggcattgcggtgttcttccagaacttctcgacatggacgggttcgggcggcatgtatctcgaggatctcttcatcgacgagtcgtaccgtggaaacggcgcgggccgcgcgctcatggcgcatctggcgggcatctgcaaagagcgggggtgggtgcgtctcgattgggcgtgcctcgattggaacgagccgagcctcggtttttaccagagcatcggcgctgcgcgaatggacgaatgggtgcatcatcgccttacgggggcagcgcttgattcccttgcggcggaggtcggatagccgtggccgatagcgctttcgggtcttggcaaccagccgatcgcgctcgggcgacggcgggcggatcggctgacgatcggttcggcggatcgcgcacctgcgcgctcgtcggcgccgtcgaattcaacgcggatcacttcgccgcccagaagttcgactgcgtgattgcggtcgatgcgggatacgggcatctcgaaagaatcggcgtcatgcccgatctcgtggtgggagatttcgattcgctcgggtacgtgccagcccatgccaacgtagaggtgcatccttcgcataaggatgcgagcgatatcgagttggcgatggagcgtgctttcgagcgcggcttcgacacgctggtggtgtacggctgcctttcgggcaggctcgaccacacctacggcgttttgcagctgctggcgaagttcgcgcggcgcggcttgcgtgtttttgcggttggcgattcgtttgcggtggccgcacttgagggcggcaagcgctccgcgctgcgtttcggcgcagtggaatcgggcatgctttcggttttcgcgctgtccgatgcggctatcggcgtcgatgagatcgggcttgaatacccgctcgacaaggcaacgcttaccaacgacgaaccgcttggcgtgtcgaacgaattcatcgggcgcccggcgaccgtgtccgtggaaagcggcacgctgctcgtgttcttcccgcttcatgcgtgggggaagatgagcgtcgggtagccgctgcgtgcaattgaaaagcgcgattttgccaaattatctcgacagtcctgcgattgggaatatatttccttaggaggcgtccgaagagctcttctctgaacaggtgttttgcaaacaggttgttttactttttggaagatggagtctggggagctttggttttgcaggactgtcgagttaatttgtcaaaatcgaccgattcgcgtgcgcggtcttgcttaaggggtgtcggttgggatggcgtgccgaatcgaaatcaaccgaattgcacgtacggctttgccagagggctgtcggccgggacggcgcttcggatcctagctttccgcctgcctgtttccgagaaaatcgcgcgcattcgccagcgcggggcaaacggcgcgcgcggaaggctataatcgctcagtggtcggcgcactgcgtcgtccagcggtcggaaggccgcctacataccaggggagcttgcaggtgcgcaacggcgcaacggcaggctgagaggaagcgcgatcccgcttcgaccctagaacctgctatggataatgccagcgaagggagttcgatgacgcagatcactgctgcacgtgacggaaccgtcacacctgaaatgaagatcgtggctgaaaaagagggcaaaacccccgaagagatccgcgagggcgtggcttcgggtcgcatcgccataccggcaaacgtgaaccatgcatcgctttcgcccgaaggcgtgggcggtggattgcgcaccaaggtgaacgtcaatctcggaatctcgggcgacctccacgatgaagaagaggagttcgcgaaggtcgccgttgccctcgagctgggcgccgagggcatcatggatctttcgaaccatggcaaaacgcgggaattccgccgcgcgctcatcggcatgtcgagtgccatggtgggtaccgtgccgatgtacgatgcgatcggctaccttgaaaaggcgctcgtcgacatcacggtcgaggactttcttgaagttatacgggtgcatgcgcaggatggcgtcgatttcgcaaccattcatgcgggtatgaaccgccgcgtcatcgattcgttcaaggaaacagggcggcttgccaatatcgtgagccgcggcggatcgcttatcttcgcgtggatggaggcgacgggcaacgaaaacccgttttacgagcacttcgacgaggtgctcgccatctgtcgcgaatatgatgtgaccatcagcatcggcgatgccatgaggccggggagcacctacgatgcgagcgatgccgctcagatagccgagctcatcgagatcggcaagcttgcgcggcgcgcatgggatgcgggcgtgcaggtgatggtcgagggacccggacatatggcgctcgacgagattgccgctaacatgaagctcgagaagcgcctgtgccacgatgcgccgttttacgtgctcggtccgcttgtcaccgacatcgcaccgggctacgaccacatcacggccgctatcggaggtgccgtcgccgctgcttcgggtgccgatttcctctgttacgtcacgcctgccgagcacctgcgtctgcccgacgtgaacgacgtgcgcgaggggctcgtcgccaccaagatcgcggctcatgcggccgatatcgccaaaggcattccccgcgcacgtgacatcgacaacaagatgagcgatgcgcggcgccgcatcgattgggaggagatgttttcccatgcgatcgatccggtcaaggctcgacgctatttcgaaagcgcgccgccttcgacggatggaacgtgcacgatgtgcggaaagatgtgcgcgatgcgcacggtgaatacgattatggacgggctgactatagatctcgatgctcgatgaccaacaggcggcgacggggacccatattgaaagcgcaaatgggtccggtcggcggtaaggagacaaccatggaacagtttgctttgaaaaacgcggtggaaacggttcgcgcaagcgtgccgctcgtgcataacatcacgaactacgtgacggtcaacgattgcgccaatgcgcttctggcctgcggaggaagtcctatcatgagcgatgagcccgaagatgtgatcgatatcacgagcatctgcggcgctctcgccatcaacatcggaaccctgaacaagcgcacgatcgaggcgatgtttttggcgggggagcgcgctgccgagctcggccatccgatcgtactcgacccggttggggcgggagcgtcgaggctgcgcaccgctacggcggccgagcttctcgacaagcttcccatcgccgtgatccgtgggaacatgtcggaggcaaaggcgcttgcggggggagctgcgaccacgcggggcgtagacgtatgccccgacgatgcggtgactcccgaaaacctggccgaatcggccgcgttcgcacgcgatttcgcgaagaagaccggagctgtcgtcgccatcaccggggcgatcgacatcgtgaccgacggggaagaggcctatgccgtctttaacggatcgcctgtgatgggcaagataaccggcgcggggtgcatgctctcatgtctgtgcgccgcatacgccgcagccaaccccggatcgatgctcgacgcgacggtcgccgccgtttcgagcatgggtttggccggcgagcttgctgaaaagcgcatgggatcacgcgatggcaacggctcttttcgcacctacctgctcgatgcgctgtaccgcatggatggcgaagcgctcgaagcagcggctaaaatcgaacgaatcgagcggtagcccatgtatgcgcgcgatgatatacgcaaggccatgcggctgtacgcggtaaccgataccgcgtggctcgacgggcgcaccctcgccgagtgcgtggagtcggcgctgcggggcggggcgaccttcattcagctgcgcgacaagcacgcatcggccgacgagctgatcgccgttgctaaagagctcgggccgctctgcgctcgcgctcgggtgccgttcgtggtcaacgacgacgtcggggcggcgctcgctgcggatgcggatggcgttcatgtggggcaggacgacatggcgtgcgcaaccgcgcgcgccatgctcggtcccgacaagatcgtcggagtctcggtgcaaacgctcgaagaggcgcttgaggcgcaggccgacggagccgattaccttggggtcggtgcgatgttcggaacgccgacgaagcccgaggccgcagacgtgagcttcgaagagctcgccgccatatgcgaggccgttgccattccagtggtggcgatcggcggtctcaacgaaacgacgatatcctcgcttgcgggcaccggggtcgatggggcggcggcggtgtcggcgatattcgcctcgcaagacatcgagtcgtcgacgaagcgccttcgcgaactcgttgacgaggcgcttgcctaagcgctacgatttgccttggcgcgacaacgccgcgccgaggcgcgtgcggaaacacggataacgacgactgagggggtcgaacatgaaagcagtcttgagcattgcgggttccgattcgagcgggggcgccggcattcaggccgacatcaagaccattgcggcgcataagctgtacgccgagacggccattacggcattgaccgcgcaaaacaccaccggcgtgtacggcgtggtcgaggtcgaccctgaattcgtcgcgcagcagatagacgtggtgttcgacgacattcgccccgatgcggtgaagataggcatggtgtcttcggcggccatcatcgaagccattgccgagcgccttgttgccaacgaggcgaaaaacatcgtgctcgatccggttatggttgcaacttcgggcgcacgtctcatcgacgatggagccgtcgaggctttggtggcgaagcttctgcccctcgccgatatcgtcactcccaacattcccgaggccgaagtgctttgcggtcgcgccatcgcgtctgacgaggatatggagtccgcggcgaaggagcttgccgaaaaaacctcgggtgcggtactcgtcaagggggggcatggaaccgagcgcgccgatgacgtgctcgtgaccgagcacgggcgggtggtctggctgcgccataagcgcatcgagaccgaaaacacgcatggcacgggatgcacgctctcatccgccatcgcctgcgggcttgcccaggatttcgagatgcaggccgccgtgtcgaaagcgaaaagctacgtgacgggggcgctgcagtacggccttgctctcgggcgcggcaacggccccttgaaccacatgtgggattactgattcattccccgtagagcagcgttccgcccacgtaggtggcaatgaccttcgtttgctggatttcgtcttcggcgatggcgagcaggtttcggtcgagcacggcgatgtcggcgaatttgcccgcttcgagcgtaccgagctcgtttgcccttccggcggcttgggcgctgccgagcgtgtaggcacgcagcgcgtctgccatggaaatgcgttcttgcgcaagccagccgccttgcggctcgtgagtgcgcggatcccgtcgcgtgacggcagcgtacagcacgtccatcgaattcacgtcgacgacgggcgaatcggtgccgaaggccatcttcacgcccttttcgaggaatgtcgagaacggccacatccagcggatccgatcgggacccagatcgcgttcggggccgccgggatcgagcgtgatgtgcggcggctgcacggcggcgagcacgtcgagctcggcgaggcgcgcaatatcttcgggctggaagttttcgaggtgctccaagcaattttgaccgtgctcgagcggtccgaacaggaggcgcgcctcttcgaagatatcgagggcgccgtgtatggccgcatcgccgatcgtatggatgcgcacggcgtgccccgctttcgcggctccgagcacgagcttgcgcatggtttcaggttcgacggtgggtcgcccccgatcgccgtcgaagcgggcgttggcgtagggttgggcgagataggccgtgtgctggctcgagacgccgtcgaaaaactgcttgaaacccggtgccctcaggcggtttcccgtgaagcgcttctgcatggattcgaggcgggccatatcgtcggtcagcgtggggaacatgtgcacgcgcacggcgaggcgcccctgggcatcgagagccgcgtagatgtcgtcgcgaacgaaatcgagtcccggacttgccatgagcgacatgtcgcagaccgaggtgatgccgttcgcaagcagtttttccatgaacccgcagtaggccgcctgcatctcctcatcggaaaacgacgccgtgatgcgcggcatcagttccatggcggcggcttcgcggatgatgcccgtgagcctgccttcgccgtcgcggtcgtagctgccgcccgcaggaggttcgctttcttcggtgatgccaagcgcatcgagcgcggccgtattgacccaaagcgtatgggcatcgcccgaatacagcgcaacgggccgtgcgggataagcggcgtcgagcgattccctgctgggcatgacggggggatcccagcggtactcgcgccatccttgggcgagcagccatgatccctcgggtcttgaagcggcaagcggcgccaagtgcgccacgtagtcggcttcgctcgtgccgaggtagttcgacgccaaaggggaactgtagagcgccgaatggaagaagtgcaggtgggaatcgtggaacccgggtaccaccaacgcatcttcgtaatcgcgcacctccgtgtccggcccgcgccatgtgaaagcgccgcctttcgggcccgcataggctatgcgatcgcctgctatggccaccgcccccggttcggcaccggcgcccgcgccggtgaacagcgattcggtttcgatgatggtatctgcgaacatcggcggttcctttgcggttcgtgggcggggcttgcggccggcgcgccggccggctaagcatgggcccgaagcccggctgctgccctacgacggaagttcgaatcggtattcgtctccgcagatggtctgtttgattttcccatcgcatacgaggtataccagatgcgccatcgtctcggccatcgagaaatacttctggtcgagtggccatcggcaccaatcggggtatttccagcgagcgttttgcgagatggagatgatgtcgtggtgcccctgtgcgaccagctcgtagatttcttccaaccgcttctcgtgatggtctttcaaatacatgacgcggttcgtgaggccggtgaacggatctccatgggcgggcagcacgaggtcgacgtcgtagcggttcatcttgccgaggctttccatgaactcttcgagtgcgttgtgcgtggcaaaccacgacgagatggcgggcgtgatgcgttcgagcacgtgatcgccgatgatcatggtctttgtcgtcggttcgtacaggcatatgtgccagttgtcgtgtccgggtgtttcgatgacttcgaactcgtaggcgcccgcggatacggtatcgccctcctcgatgtaggtgacggaggggcggtgcttcaggggcaacagctcagcatgcagtttcagccggggtacgcccttttcgaacgaaagtccctcgtcttgggggcgcgccgcttggcgaacgagcggctggaatactttggcttccatgacttggaggttttcgacctcttgaaaggagtggaggtttgcgcaaatgcgcatgccgttccgatagatgcgatcgaggttgccggtgtgatcggggtgcgagtgcgtgagtacgatctgcaccgtatcccaggtgcggccgagggcatcgagtgcggcattgagcgccgcttcgcaggcggggtggtcgaagcccacatcgacgatggtcgtcgattcgtcatcgacgatgaaatacgaattgagttctctgaggggattatcggggagggggacccttacacggtatacgcgggggatgacttcggtgatgaagccgtcgtaatcgaaatcgtattgcggcatgccggccgatgctgttgccatggttacctcgttgcctcgcaggtgcttgtgcccattgtacctcggcacggtgtcggcaagcgctcggtccgaaaacgttccggtgaccgttttcgcgctttacgcgtgcgggcgatacgcttcgatgaaggaaaaaggcaagcgtgcggaagcgcgccgcatcgccgaactcggaaacggcgccgtttccagatgaaaagctcggcaggcaggccgcaacgataggagcatccgatgggagtacagccgtttcgcttgacggcggaggaagcactgcaaagacagggatcgaatctggatggactctcttttgaggaggcattcgcacggcttgcccgcttcggcgaaaatcagcttgtcgatgcggggaagaaaagcgtgctgtcggtgttcttcgagcagttcaaagacctgctcgtcatagtactcatcgcagcggcgggcatatccctcgcgtccggtcacgtcgaaagcacgatcgtcatttttgccgttattctgttgaacgccgtgctcggcaccctgcaaacggtgaaagccgagcaatcgcttgcaagtctgaaagacatgagcgctccggtagcacgcgtcatgcgcggaggcgagcgtgtcgagattttggcatccgaggtcgtgcccggcgatcttctcgtgctcgaagcgggcgatctgatcgcagccgacgggcgcatcgtcgagagcttctcgctcaaggtcaacgagagcgcgctgacgggggaaagctctgccgtcgagaagaactcgcttcccatcgagggcgacaacgtggcgatcggggatcgggagaacatggtgttttctggatcgcttgtgatctacgggcgcgcatacgccgtggtcacggcgacgggcatggctaccgaaatcggtagaatcgcttcgctcatgaacgaaacgaaagagcgtaagaccccgctgcaggaaagcctcgacgccttttcggccaagcttgccatcggggttgcgattgtctgcgtcgtcgtgttcctgctttcggtgtttcgcagcggcatggggattgtcgattcgctcatgttcgccgtagccctcgcggtcgccgccattcccgaggcgctcggctccatcgtgacgatcgttctcgccatcggaacgcagaagatggctaaacagcatgcgatcatcaaggacctcaaggcggtggaatcgctggggagcgtttcggtgatctgctccgataagacgggaacgttgacgcagaaccgaatgaccgtgcagatgatctacgtcgacgggcgcttggtgccgtttgaagagatcgatctcgcagacgagcccgagcgccagcttgttgaaatagggctgctggcaagcgatgcgacgaccgatgaaaagacgggtgcggcgctcggcgatccgaccgaggtcgccctcgtgcagatcggcgacagcctcgctatcgacgagatggcctaccgcgccgaacacccccggttgcgcgagctggctttcgattccgatcgcaagctcatgagtacgcttcacgagctgcgcggcgagcctttgctgcttacaaaaggggcgctcgacgtgctgctcggtcgctcgagcgccattcttacagcgcgcggcgccgagcccatcaccgaggccgacaaggcggaggttctgcgcgtgaacgatcggctttcccaagatgggcttcgggtgctcgcgttcgccatgcgccccctcgatgccgttcgcgatttttcggtcgaggatgaggatggttacgtgttcgtgggtcttgcggccatgatggatccgcctcgccccgaggcggtggttgcggtagccgatgcgaggggggcgggcatccgcacggtcatgattacgggcgaccataaggtgaccgcttcggcgatcgcccgcgagctcggcatcatggacgagggcgagatcgcggtcgacggcgtcgagctcgatgcgatgagcgaagcggatctcgacgaggtgcttcccttcgtagcggtgtacgcgcgcgtttctcccgaacataagattcgcatcgtgtcggcttggcagcgtcgcggcaacatcgtggccatgacgggggacggcgtaaacgatgcccctgccctcaagaaagccgacatcggcgtggccatgggcatcacgggaaccgaggtgagcaaggatgcggcatcgatgattctcaccgatgacaacttcgccaccatcgtgcgggccgttgccaacggccgggcggtgtacgccaatatcaaaaacaccgtgcattttctgctttcgggcaacatggcaggaatcatctgcgtgctgttcgcatccatcgccgcgcttccggcgccgtttgcccccgtgcacctgctgttcatcaacctcctgaccgacagtcttcccgccatatccatcggcatggagcccgcaaacgacgatctgctcgatcagaaaccgcgcgatccgaaagcgcccattctcgatcgcacgctgctcgggcagatcgggtcggaaggcttgctcatcgccgcagccaccatcgccgcgtttttcatcggacttaacgggtcggacgaggcggttgccatgacgatggcgttcgctacgctttcgctcgcacgtctgttccacgggttcaactgccgcggcgatgcgaccatcatgcaccttggccttctgagcaacccctacacgctcatggcgttcggtgcgggcgtcttgttgcttgcggcggtgctgtttgttccgtttctccatcccctcatccaggttgcggatgttacgatgggacaagtcggcgcaatcgtcgccttggcgttcgcgccgacgttctttatccagctgtaccgcgcttgcagaaaggcgttcgtcggcagataggaggccgtgatgggcatgaagagaacggcgggaatcgttgcggcatgcggcgctgcgcttgcagcgctctacggtgcatcggtggttgccatcggcaacacatgcatagactatgcgctcgtaccgggcaaggatggcaagaccgggcgcatgcgccgacgcgatcggatcgggggagatttggcgaacggatcggtcgcctccgacgtgcgcgatgccgtcgagcagaatcggcgcatgctttttgcaaaacgggatgcgtggcttgagcgcacggatgtcgagcaggtgcgcattcgcgcttcgacgggcgttgcgaaagggggcatatgcggtgcggcgcgtgcgcatgaaagcgatgcgttcgatctttcggggttcatctacctggcatcggatccgagcgatcggtgggtgctgctcgtgcacggctacaccaactcccaccacgacgtcgagtacctgggtgcgcgctacgctgcgcatgggtacaacgtgcttgctcccgatctgcgcgcccacgggcaaagcggcggcgatcttatcggcatggggtggacggaccgctgcgatcttctgctgtggatcgactatctgatcggacgcttcggcgcagacgtctcgatcgttctgcacggcgtttcgatgggggcggcagcggcatgcatggcatcgggcgaaattatccctgctcaagtgaaggctgtcgtttccgactgcgccttcaccgatttgcagtcgatgctcgccggccaggtgaagaagctcttcgggctgccgcgccatcccgtcgtcgatgatgcgcgcatcatgctcaaagcgcgcggaggctacgacatcaagcatgcatcggctctcgagcaggtgaagaagagcgtaacgcccacgctgttcatccatggatcgagcgacgggttcattcccgcatccatggcccgcgagctgttcgaagcgtgcagggcgcccgaaaagcggctgctcgtcgttgcgggggctggacacgctctttcggcgcaaaccgacccgagcctttacttcgacacggtgttcgactttctcgagaaaaaggcgggctaggcgcaatgccgcgataatggacggtgcgggcgcctgcgacgaacatctcgcggggtgcgaagggttgcgccgcgtgcagacgatgcgagcccgacgaagcatccgccgggctcgcatcgggcctatctgcgcatcgattccctacgcgaatccgaacagcatgcacagggccggcagaagcgtggatgtcagaaccacgagcagcacggtgggaatccagccgaccttcaccatgtcggacatcttgtaatatccggtcgaataggtgagtatgggcacgcagtcgagcggcaggatgtaagcgagcgaagcctgccaggccaccaccatcagcatgcagtacatgctgatgctgaagtcgcccgcgataacgccgaacggataggcgaggatgcccgctacagctgggcccacgggaacgatgttgtgcacgatggcgccgatcgtcgaaagcacgatgagcaccacgacgggaaccttccagctttcgggcagtgcggccacgacggcggcaaccatccagtcacccgctccggtggcaaccacgaaatgcgcgaccgacaagatgcacatgatcatgagcagcacaccccagttcatgcatgatacaagccccttgaattccaaagtcgaacaccctggaacggaaagcaagacgatggcgaagatggcgatcatggcggtgttcaggaagctgaaccacgagctcagaatccaaaaaaccattgctagcgcgatgatgacgatcgtcatcacttcgggacggctgatcctgcccatgtcggagacctccgccatcgtggcgtcgatagacgcctgcgtgatgggttcgggcttgaagaaccgcgtgatgatgaaccacgacgagaacagcatgatgacgcagaacggaaaccccagcatcgaccactcgatgaagttcatgttcacgccgaacagcgacgagaacaaccctacggtgatcacgttgcagccgttgccggtcatgactgcgcagcctcccgcatacgatgcccagggaatggcgatcatcatggctttgcccaggggggatttcagcttttcggcttcgttgagctcgagcagccgcttgccaaccgagatgaacacgccgcaggcggcaacatccgacatgaaaaacgagaggaaggctgtggcgcacatgaagccgagcagcatcttgttggtgtcggtgcccgaccatctgagtacgaacgccgctatgcgggtggggatggtggtggcatcgagcgcgaccgtgaacgcgaaggtgcccatgaggaagaacaccgtggagcccatggcgttggcgtacgcttcatcgaaggtgcacacgcccatgatcggcatcatcaccaaaatgagcagcgcggttgcgggcagcggcagcgattcggtgacccacaggagaatgcccgctcctagaatgcccagcaccatgcggccctcgtaggtgaggccggccgtcggcggggcgagcgccgtcgcggctatgatggcgacggccaagagaatgcacgccacgttgcgcgggcgcagcgaagcgcgcatgagaacttcagacacgatgtacccccaaatcgtaaatggagccctgtgcagccgcacgaaaatgcaatcagggttttccctcttcggttcggctgcttccgggccctgcgcatccgcagggcccggaaagggcgtgcaaacagagttttacatggctcctaccattggaggaacgacgagcaggaacacgctgaagaacaccatcgttgcgatagtgacgggcaggccgcccttccacatctcgttgaacttgtagtacccgcccgcgtaggatacgagcagcaccgagtcgagggggacgaggaagcacagagcgcaccagagggccagcatcaggatggtcgcggtgaagtttccaccgacggcggccacgaggcccaggacaggggccgttacgagggctgcaaggccagggcccgaggggaagaagttgtgcacgatggccaacacgacgctgatgaccatgaacagcatgacgaagctcatgcccgaggtgacgccgaggagcatgttgacgatccatgcgacggagcctgcggcggacatggcggcgacgatgccgttgatcgacgccatcatcagcagaatgtcccaagggctttcagagcggtactgcttcgtggtgatcatcgaggtgccgggcaagaacagcaggccgagcgcgatgagagcgacgaacgtggtgttcagcacgggaatccaggagcttgcaatccagcataccaacgcaaccagcaaaacgccgatgttgaacttctctttgaaatccatcggcggcagagccgaaacctctcccaggaacttgtcgacggtctcctggctcaagggctcgggtttgtataccttgatgaggattatccaacaggctacgaggctcagtgcgaccgggatgatggtgtagccgaaccattcggcaaacgtgatggtgacgccgcaggcgctttcggccaatccgaggacgacgacgttgatgggcgtgccggaaggcagaaggcatccgccgaacatgacggcgaagggaatcgcaagcgcaaggcaacggcccatgttggattcgcccggcctcgcgccggctgcgcgcagaagcgaagcggcgaagcccatcatgatagctgtcagggcgatgttcgacatgaccatcgaaatgatggcggagatgaccatgaagcccagaatgaccagattgatgttgcctttcaccattcggacgaccatggctatcagacgttggggaaacgtcgataccccgagaaacgtcgtgaatccgaagatgccgacgaacatccaaagggagctcgtgaacgttgcggcccagatatcgttgtaggccgctatccccagaaacccgcacagagccaccatcacgagcgatgtgatgggcagcggcagcgcttcggtcgcccacatgacgaccgccgccagcaagaccatgatggcggtctgccccgcgcggctcagctcgggcgaccacagcgggccgaactggcccactaagattaaaacgatggcaacggcgatccagatccatttgaagagaaccttgttgctcttggctgcttcagccattgttaccccttcctgttttgcttgtcttcgaaccccgcggcgcggttgtgcgcgccgcgggggagcccctgcgagcgcttatgcaacggcgctcaggaagatgtcgcccaaaacgacatccttgtcggttgcatcggccgagagcgcgatgtcttcgtagccgtcgacggaggcggctacggtgtatgcctgctcgtccagctccttgaagcggaactcgccgaactcgtcggtggcaatgcgtgcgatctcggtgccttcggcatcgagaagctttacggttgcgccgatcacaacctcgtttatcgagcggtcaaccagcacgccgtagatccagcgcttggggacgttcatgtaatgcacatggggatggagttcgcttgcggcgggcatgggcaccgcctcggcgggcacgtcttcctcgtcgatgtaggtcagggcgcccgttgcgcatacgtcgacgcagcggggaacctcccacccgtcgtcgatcaggtgcgcgcaacccgtgcatttttgggggatgtcgagtgcgtcgttgtagtagacggcgccggcggggcatgcttctgcgatggccttctgaccctttgctttcaccgggtctatgatgatcaagccgtcttcgcgacggtacacggctccgtcggttgcggcctccatgcaggccgcgttttcgcagtgcccgcacataacgggcgtgtactgcaccttcacctcggggagcttgccgcgggtgacctgctcgaccttgcaccagaactggcccgtcgtgggctgttcggcggcgatggggctccagtcgttgccgcagtgttcgtctttgcaagccatttggcaaccgtagcagccgttgcataggctggcgtcaaacagaatagttttcattcttaagcctcctgcaaatagtcgtagacgttggtgcccgtctcgatggtgtagtgctcggcctcgaaggctgcggggtactgttccatcagagcgttgatatcgcacttgcgcacgcccaccaagaagccgcccgtaacttctccggctgcgttcttggacgaggtggcgctcggtgcgatcaggttgttcgcaccgccgcggtcgatgccgcccacgccggttacgatcggatcggtctcggcgccgtgatcctgcagaacggcgccggggattacgcgttcggtgatgtaggctccgcccagaaccgtgccgcgctcgttgaacacctcgacgatatcgccgttttcaatgccgagctcggccgcgtcggtcgggtggatccataccggttcgtacgcgtagccgtcaacgccgacgactttgcacgtttcgatctcgcgcgtccacgggcagtcgtcgaagttggcatggatgcgccagcgcgggtggttggaaaccagcaggaagggatagtccttggcgcggtcgcagctgatgcgttcatgatgggtttcggactcctcgatccatttggcaaccggctggcgctccatgtcgtcggggaagaagttggcgagtcccgtcgaatagaattcgatcttgcccgtgggggtttccatggggtttgattgcggatcttcgtagaattcgatcatgccggcgggttcctggtcccagccctcccgggtgggaagcatctggtagccctgctttttgatgagttcgagatcctgctcctcttcgggcaggcccgatccctggtatccgacttcctgccactcctcgacggtcatatcgcccgaaaggtggcttgcgcaatcctcgtagatgccgccgtaggtttgcagttttttggcaacctcgagcacggcttcgtaatcggaaagcgactcgtgctggcgatcgcatgccttttgctcccagatgatggagttgaactggcccgagtacgtgtcgacgccgaagtcgtccaactcgagggtagtcgagatgggcaggatcaaatcggcgaacagggtgtcgttttccatccacggatgctcgaccaggaaaaactcgaggttggggttcaggagggcatcctggaattcgttgccgccgttccagcaggtcgaccagcagggcgaatcggaccagatcatcttgatgccgtgatcgccgtcctgcgggaattggaatttcttgaactggtcggtgcggtggtgacggcttgtggtgtggccgtaccattccaccttttcgcccggcttgacggtgatgcattggggcacgagcgtcttggggatgaacgaggcgggaagctcgccgagcaccgatccgtgatagcaggcgcgaacctcgggcaggaagtatccggggggcagggggttgaaggaatccatgccgatgagcgcccattcgatgaacttgacctggttgcgacccggcttgccgacagcctgcatggcaagcagatacacttcgaggcgggcgggctcgtgggagtagcaggagcggatgtaggatccgccgttgcagtggccgatggatacgttgtgcgaagcccagtagcgtgcgagcgccttgatgcggtaggcgggcacgtgacatttctcttcggcccattcaggggtcttcgggatgccgtcctcgttgccgagcacgtagtattcgaaccagtcgaagccttcggtgtgggtttccacgtattccttctcgtaggttccctcggtcatccacacgtatgcgatggcgagctgcagcgcggcatcggtgttgggcagcacgggaatccacatgtcggagtgaacggcattcgcgtagttcacgtcgggggcgatgtggatctgcttcacgccgatttcggtgaaccagaagcacaggcggcttgcttgctgccccgaccatccccacggcgtggtttcggggtcgcagccccagaacagcacggcgtcggaattctcggagatatccttgaacaggttgtgctgatgggtgttctgccccaaaggctcgttgccccaggcgtgcttggcaccccagtaccagccttcccagctatcgggctggcgggcctgcattgtcaggccgccggtcatgtcgagcaggttcgccatggttccgtgggggccgtggatggagccggtctcgccgtggccgtcgccctggcagaagatggagttgcggccgtaggtctcgtcgatgcgcacgatttccgcggcgatgatgtcggttgcctcatcccagctgatgcgctcgaatttcgatttgccgcggttttgggggttgcgttctccgttcgggtcccaatcgacgcgcttgagcgggaaggggatgcggttcggggagtacgtccgggttttgtaaatgaaggtgaacggggagttcagcgtcttcatgccgggttcgaaggtgtggcccttcgcgttgatggtccagtaattgagatcctctttggtgtaatgctcgtcgtaatgcacggggcgcatacgaacgatctttccgtccttggagtcgacagcggtgagattggcgccgttgccgaaagaacatagcgacatgttcttgtagattgtcttgtcagacgtcttcatgctcctcctactttcttcgtcttctgctctttttgtcccaagcgatcggatggcgcggttggccgttcgatacgccgtcctgcttggatgagcgatcctgaacccgaacctcccgtgcgcacgaaagcttcgattcgatcccccacagcgagtgtatggatcaacgcgagcggtgaaaataagcgacccgttgggctgccccctgtttttgtgggggctccttccggcttcccatttcattgacgaagcacaacaatttgctgtacctgcttttcgtatacgcagttcagattggtggaaatatcgattggcattccgtttagccatcgtttcgggcaagggggagctgaatccgcaccccttggatatcctctttgccatataatgatcgcggttcagccgaattaatgcgggatagggggctccgtgaacatcgagtatctgcattactttttggatgttgcgaaaaccaagtcgatcaccagggcggcgaagctgaatttcatttcgccccagggcatgagccgtgcgatgaacgagcttgaaaaagagctcggatgccagttgctcatccgctattccaacaagcttaccctgtccgccatcggagaggaattggttcccaaagctgccgatatcatcgagagctacgctgggatgctcgagttcgcggcagcaaaatcccagctgcagcaagtgagatcccactccatccagctcgaatgccaaaacgtcgccatgctcgcctttcttacgaaggaggcgaaagactacattttcgaatcgagcgagatccattttcgcgaatcgcagaactcccagatccgtcacgatcttttggcgagcaatgccaacgggctttcagacgcttgccccatcatcggactcgtgtgcttcttcaaccaggatcgtaattccaatgtggggggcatcgacgatctggagaagaagggctatcagtaccgcccgtacctcaagacctacgatcgggtcatggtgaacgcgcaatcttcgctggcggggaaagatacgcttaccgacgacgatatcgtctcgaaacatctggtttccaccaacacgtacttgtacagccttctgtccaaacgcttcggacgcgaggccatagtgctatcgagttccgatttctccttgcgcaagcgcatggtcgaatgcgattcggccgtttcgttccttcccgccatcgcctcgctcaccatggccgaggagacggggttcgttctgcgcgatatggagcactcctacgaggtggagatcgggttcatcggcatggaggccgatctcgaatccgattgcttcaccggtctcatgcagattctgaacgatttttaccgcgcgcatgccgacgaggggtattacacgctctgcgactagattcggctgttcgggaggcattgcgatgcgcaggcggcagatgccgagctcgcgagcgtcctttcctgcgttcgcatgcttgtctgaagcgctcgtaggcgcctgtcaaaagcaatcgcgctcccgctggaggcagcgggagcgcgagatgcatggcgcgtttcgattgcgggcgatgcggttggaaggcggtgccgtgcgatgcgcgctccgcctgtgcggcagcccgtttgccttgcttacgcgcctggggccttgggtgcgccgggtgctttgggagctccaggggctttgggagctccgggtgcttttggggctccgggcgcaccgggggccttgggtgcgccgggcgctcccggcgacgccgcgccgcttgcggcgaagccgcattcttcgcacaccgttgccgagatggggttctcatgaccgcacatggggcaggcgatcacgttggtattgacggctgctggtctgaagcacatagtttcctccattcgattcgctctacggtttcacagcatatgggagcttttcattcgtgaacagcagtcggatattgtggctccccaacgaaaactgtgggagggcgtccttgcttatcgggctagacggccccgttcgggccttcggcctcgatcggtcgcgccgtttcgacgagccactcgttcgttttcgcccgaagggcggcttcttcggctcttcgaagaccgccgtgggctttgagatcgtcaagcgtttcgtcggggttgccctggcttgttttccccaagtaggctttcagctcggattgcgtgatcttgatgccgtgatggcgcgccatggcatcaagcgccaggccctgtcgcacttgctcgcgggtctggctcatgaggcggtgcttcaactcgtcggcgctcatgttgttttcgctcaggtaatcctgttcggttatgccgcgcaaaacgagctctccgcgaaatccctgcagcagttcagcgtagtgggaggcgaatgcggaatcgggaaccggttcggtcaggcgctgcgataccgcatctgcggcgcggtacagcagatagccgtgcgattgctctgtcgcctgttgctgcagttctcggcgggccttctcgcgcagttgcgcaaccgaagcgcatgcggtgatgtttcgcgcaacccatgcgtcgtcgatcgttggctccacttgcttcagaatggctttgacggtggccgtcgccgtgtacgaccgaacgggaaagacaccctttgatctgcggttgggaacgggtgcgctgaattcaacggttcttgtttcgccgatgcgcgcaccgaggatcccttcgtcgaagccttctggcatatcgcctttccccagttggtattcgcgctcttcgaagcaaagcccatcgacgcgctttccttcgcgccaggtttccatggcaagcgacacgagagagttggcgccaacctcgtttgtggattcatccgcgacgctgtccgggtggtagcgcgccacgcgggatacgaaatcgtcgatatccccctcgtccacttcgctgtcgatttcgggtagggcgacaggtccgtacgaatcgagttccatgttcggtttgacggttgcgacgatgtcgaaggcgaacgtctttcccgattcggcgtagccgtagcatccgtaattcggcacgcccatgatgtcgatgccggcttggtcgagcacggcaggggcggtcctcgacgctacggtttcactggccgaacggccgatttcatcgtggtcgagctcttgttcgaccagctgtttggcggtcagtcctgccgcgggcttaagccccgcattttgggcggctgccatgtaaaaggttcgcaggcgctctgttacctcggtcgcatcgagctgcaccgatatggtttgggtttctccctcgcgggcgcgaacggtgtacttcatggatatcctttctcccgatcgctcttcgtcttctgctcaggataaacccccgatcgtgcggcgggacgatcggggcgtctcgcattcgttgcgctgcgtcccgtttccgttggcctgatctcggcgatttttcactgcgggtacgtatcatgtgattactgcaaactaccggtaaggaggatgaaatgcttggaccgctcggtggagaccgtctgtggaatccgaaagaactcgacaaatgcaaggctgccgcacaggaattggtggacgctcaggaaaagagcgccgacgagggtggcatcatctacggatacatgtatacgatgaacaacagcaactacggttacaaaggcgacgatcttgaattcaaaagcgcagcagaaattgcggcttttgatgcaaatgggcaggttaaggaaacgtacgtcgtgtacaagcaggcttaagcagctgcttgttgcaaggctgcggaatcgcatgccgtttcgctggaaccagaaaaacagtcgcccggatgcttccaggcgactgttttttctgaagccttgcgggcctttgcgtctctatgccaagacaaaacccaaggcggcgaagatcgcaacggttaccgcccactcgccgaagcagagcgggagttgggccagggtgtgctcgatcggcttgatgcccgcgcctatgcctgccaggttgttcgtatctccgaaaatgcacgagcagcttccgaagacggcggcggatacgatggcgccaagggtcaggaacacgtctgctccggtggagatggcgagagctgaggctatgggggtaacgattgctgcggtgccccaataggatccgctgctgaagcagatcaggctcgtgatgacgaagattatgaccggcagcagctgcgcgttgatgagggggcttgcgagatcgacgacgtattcggtgaagccgagggccgcattgacctgaaccagcgtgaacgtgaagaacaacatgatgaccgtcgggaggatggttgcggccccgtcgaggaacgcggtgcgaagcgtctgccactttccgattttcgcaaagtagaacatggcgaatgcaacgaggatgccgagatacaggcccgcaacgatattgccgccgctgataatcgctgcggctatcgtcaccgccatgggcacgatgaagtacgacgccttcggcttgaaatcgacgttggcgctgtcggcttcgtcttcgatcacggtgcctgcggtacgcattgccttgagggcggggatgatctttgcgcctatgagcagcgtgacgacgatggttacaaacgggtagatgaaaaacggcatcgacccaacgtagaggtcgtatcctgaaaggccgagcgacgacaaggcgtcgttttcgaatatccccatgaagaagacggaccataccgttgtgggaataagcaccgccatcgccgccgccgttccgtttgcgatatgggcaaggaccttgcgcggcattccgaagcgatcggctatgtctcgcatggttgcgctgacgaccattgcatgcatgtagtcgtcaacgaaaagagcccagcttaaaagccacgttgcgacgcctgcggaacgttcgttccgaatgagcttcgatgctttttcggaaaacgcctctgcgcccctcgagtagttcaggagtccgatcaacccggagaagccgaagctcgctattgcgaccatcgtgaagcccggatcgaccattgcagcgtacccgtagtcgatgagggcgggcaaaaagcccgttcctgctagaaggatgcatccgagcacgcatcccaggataagcggctcgatttcgcgccgagatatgattgcgacgacgagtacgagcagggtgggaatcaccaccagaaaaccgagttccattctcttcctctctttcttccgttctatgggtttgggtgaatcgaacttagagcacgaagccgaaaagcgcataaagggacatggcgagcgcccaggcgatcaaaccgtagggcagttgggtcaatgcgtgtcgaatgggcgtgatctggcatgacgatgccgtcagaaccgttgcgtctccaaagaaacagcagttgctgccgaacaccgcgcctgagattgttgcaccgagtacgaggaagatatcgcatccggagccgagcgctaaaggaacgatgatcggcatgacgacggctgcggtgccgaagaacgatccggtgccgaacgcgaggatcgaaacgatgaggaaggtgacgcagggaagcagctccggagacatgatgggggccatcgtttcgacgacgaactcggttgttcccatgcgggcgtttccctcgaccagcacgagcgcgaagaatacgattccgataaccggaagcatgctgacaatgccttcatgcacggaatcggcgagctgtcgtttcgtcaggaacccccggtgcagaaaaagtcccgcagccacgatcgttgcaatgatcgcgccttgaaccacgtctccttcggtgacgaacgtgatgatgacgagaacgagaacagggatgatgaagtgacgaggctttgcaccgccgatttcggggacggcggcggtccggtcgatcggcttgagggatgctttttcgcaagcgtccctcatctgaccgaggggcggtatgatgccgacgatgacgaggggaactatcaggatcgcgatgatcgagtagaagataaacggaacgacatgccaatacatatcgaattccgataggccggtctgggcggttaaccccagttcgccaaacatggacatgaagaatatcgcccatgcggaaaacgggagcaggacggccatgggggctgccgtgacatcgacgacgtacgcgagcatttcgcggggaactccgtagcgatcagtcgttcgcctcatggtcgtcccaactacgatcgcgttgaggaagtcgtcgatgaaaagaaggattcccatggcccatgaggcgaaaaggctcgatttggcggaagtgacgtgcttgttcacggctgcggaaaacgcctgggcggcctgcgatttgtcgagaagctggacgagtatgccgaaaaggatggtgaccagaacgatcatcccgagcgtatcgccttgaaaggttgcataggctgcattgacgaaaccggaggcaaaccagatgccgtcgagcataaggaaagaaacaacgacgccgacaacgaggggggcgatggcttttttcgtcacgattgcaatgacgaggacgagcgccgtcggcaacagcgaaagaatgccgtagttttcgatcatgacatcccacctagcattcgaggacctttctctggctacgtctgcagtaatggacgctgggattcgatgtgcggggactctgctgaatccgactaaaactatatacgtgcaagacggaccatcccggctgaggcgggttttcgtgaagcgcggtaacggaatgctcatccgttactttttggtgcaaattgttacattttgctcgtgatcatctggtatgcgatcatctcgacgatcgcgatcatggaaacccgggatgtcagatcgtatccttgataggttatcttgtctgcgaaaacatagaaatcaaggtcgctcagattctgcaaggtgttgtttcccgaccaggttacggaagccacgaggggcttgcatttcgctcgcgcttgctcgacgatgcgcaatgcgcttgcgtcttctccggtaagcgaaaagagaaagatgatgtcgccgtcttcgatatgcgcgagcatggaggagacctcgtagtcgtcctcagggaagtacgtggtgtagcccgtagaggtgaagagcctgtaggcgtatcgcgcgacgttcctgtcaagtccgttgccgtagaagtagatggttctgctcgattccaaggccctctggaactgctcgatggttcgataggatagaacgcgtacgctttcgatgatgttcttgaggtactcttcgctgtattcctttcgccagacgatgttcgggatattggtttcgttggtgctgtggagtgcgatttttatcgcatcggagaagtcgcgatagccatcgaatccgagttttttcgtcaggcgcaagacggtggtggtcgatacgaagttttcctgggcaacttgtcggatgctctttttcggcatggactgaatgttgcgtacgacgtagtcgagaagtttgcgttcgttgacgttgagattcgggaggttggaattgatgcgctcgaaaaaatccatgcccactcctgttcgcggtaacagagttactagatatgtaacgctattttattccttttccccgtgttacggaaagggcttcgaagctatttctccgctttgctcctcggtacacttccgagggtaagggcggtcgagcatctgggctcaatgcctgaaaacgaaagtttcatgcgattaatggaggtaattcatatgagcgcgcaggccagaaccaaaggagaagtcaaacacttcatcgatacgattgatctctcgaagcaagagatgctcgatctgttcgaggttattcgcatgctgaaggaagccgattaccagggcgctgttcccgatattttgaagggagcttcgctggccatgatcttcgaggagccgtcgacccgcacgcgcgtttcgtttgagaccgcaatgacggacttgggcggacatgcgctgtacctcaagcctggagagatacacttcggatctcatgaggcgattaaggataccgcccgcgtggtttcgagcatgacccatgggatcatgttgcgggcgaaagagcacgaaagcgttctcgctcttgccgaatacgcaacggttccggtcttcaatgcgatgacgtactacaatcatccgacccagggcgtttgcgatttctttaccatgagcgagcatttgcccgaagggaaatccctcgaggacatccatgtggtgttcgtgggcgattctcgcgaagatacgggcatcatgagcaaggaaaccgggcatatgtgcgctacgctcgggctgcgctacacggtctgctctccgaagaagtattccatgtcggatcaggaacaggcgaagatacgtgcgaagatggaggaaaccgggggaacgctcgtcgttaccgacgaggttgaggaggcgataaaggatgccgacttcatcgtgcccgacgtatggacctattacgggtacgaggacgaggaggccgatcgtctggcgagtttcatgccgcgctatcagctgaacatggacatgctcaaccgcgcgccggagacctgcaaagcgctgcattgcctgcccgcgaatcgcgacgttgagatcaccagcgaggttttagaccatccgacgcgttcgctggtgttccaggaggcggagaacaggctccatacccagcgcggcttgcttgcctggtacctgtatcctcggctgcgcgaagcagatgagagcctgcgcgcattcaacgagggcaaggtacgcagtttcctcgacacgcgtttgaagtaagcgtttcgatccgtttgagcatgttcgcttcgcaagagaagagaaggatactatgagaacgatatacgaaagcgattctactccgaaagcagacggctttcgcatgcccggcgaatacgagttgcaagagcgcatatggatgctttggccgcaccgcaacgatacttggtcgttcggcgcaaagccagctcaaaagcagtatgccgacgttgcccgcgccattgcgcaattcgaacccgtgtacattggcgtgaacgaggccgactataaaaacgcacaggctctgcttggcgaggatgagaacatccacgttatcgaaatgacgagcgacgatgcttggattcgcgataccggcgcgacgttcgtggtgaacgacgctaccggcgaggtgcgcgcagtacactggcatttcaatgcgtacggcgggttttacgacggcctgtactttccctgggacaaggatgaggaaatcgccctcaagatgagcgagctcgccggggttcgccgctatcgtcccgacacgtttatcctggagggcggttcgattcacgtggatggcgagggcacggtcatcacgaccgagatgtgcctgctttccgagggccgcaaccccgatatgtccaaagaggagatagagcggcacctgtgcgagtacctgggttgcgagaaggtcatatgggtcaaagacggcatcgatcccgaagagacgaacggccacatcgacgatctcgtgcagtacgtagcccccggaaaggttctctgcatctggaccgatgaccccgattaccccttctacgaagagtgccatgctgcgtacgaaacgctttcgaacgccatcgacgccaagggccgcaagctcgaggtcaccaaaatatgcatgcccgaaaagccgctgtacatgacgcaggaggcgtgcgattcgatcgacatcgacgagtatgccgaaccgcgtgtggccgacgagcccctcattgcttcatacatgaatttcctcatcgtcaacggcggtgtgatcgtgcctcagtacggagacgagaacgatgcgttggcgcttgagcagatacaagctgcattcccggataggaaggcggtgggcgtgcgtaccgaccaggtggtttacggcggcggtaacatccactgcatcacccagcagcagcctgcgagcaagtaggcttgtctggctcgggcaaatcgaatggcgaggcggccccggatgcggggtcgcctgtttctagaaccgcaaaggaggaatccccatgccatacaagaaaggcgagggcaagagcgtggtcatcgcgctcggcggcaacgccctcggcgacaccccgcaggagcagctcgagctcgtcaagaacaccgccgagcacatcgtggacatggtggccgagggcatcaacgtcgtcgtgtcccacggcaacggcccccaggtcggcatgatcaacaacgcgttcgactacgcgagcgcccacgacggcaagacccccgagatgcccttccccgagtgcggcgccatgagccagggctacatcggctaccagctctcccaggccatcctcaacgagatgaagcgccgcggcatcatgcgctcgacggcctgcgtcgtgacccagaccgtcgtctaccccgacgacccggcgttcgacaaccccaccaagcccgtcggcgccttcctcaccgaggaggaggcgaggcgccgcgccgcggagaccggcatggtctacaaggaggacgccgggcgcggctggcgcatggtcgtcgcctccccgaagccccagcgcatcgtcgagttcgacgccatcagggacctcatggacgacggctacatcgtcgtgtcgacgggcggcggcggcgtgccggtgatcgagcgcaacgactcctacgagggggtccccgcggtcatcgacaaggaccgctccagcgccaagctcgccgccgacttcagggccgacatgctcgtcatcctcacggcggtggagaaggtcgcgatcaacttcaacacgcccgagcagaaagagatcgactcgatgacggtcgccgaggccgagaagtacatcggggagggccagttcgcgcccggctcgatgctgccgaaggtcgaggcctgcatagagttcgtccgggcccatcccgagggccgcgcgctcatcacgtccctcgagtgcgccgccaagggcctcaaaggcgagacgggcaccgttatcagggcgtaagcttgtcctctctcgcttgaagtcgctgctccgtattcggataggggcagcgactttttgcatggggtgctgatcggagttttcgagagcgctccttccgaatgcagtatggcgatcgagctgcgagaggatagggtgcccatcataggagcggtccgtatgcaaaagagctcggggtacggggcgctgcctatgagaatgaacttgtgcccgcatcgatgctcgggaagacttcgtccatcgcaatagtcgtgcgacaatgtgctatcctatggcgaacaggacggatttacgggcaagggagcatgggctttgggcctgctgatcgttgcatatttgtttttaggcggtgtcggggcgggtgcttttgccgttctcgccctgcttgatttcaagtacggacatgcaggtggctctttgcgtgcaaccgagtctggtttcgcaggaggtcgtcatctcgattgcctgctgaaaaggggatatgccgtctcctttgtcgttttggccctgggagcgatatgcctgctcgcggatttagggcgccccgagatcgcgtttctgcttttcacgaggccgaccacgtcgtacatcagcattggcacgttctccctcacggcgctgctcctgtgcgtggcgtacttggcgatcatacggttcttctcgctgcctgcggcggttcggcgggcgaagcccatcgcgcttgcggtggggtttgcggcggcgttgttcgtcatggcgtatacgggcgttttcctgcaatccatgaaagcggttccgctgtgggattcgccgcttctcatcgtgatgttctttctgtcagcgctctcgacgggcattgcgcttgtaatggcgtgttcgaacgggcttttcgtgcggcgtccggaaaagaaccttctatcgcgcttggcggcgatcgacctagccgttatcatttcggagctcgtcgtttgtctcgcgtatctgctgtcggtctcgatggcggatctaggggcccagtcggtcgaacgcctgcttctgggtgatcatgcgctggtgtttttagcgggtttcgtgctgtgcggcctggttctgcctggcatcttgaatgcctatgccgcgcgatgcgaacacggggaatggattgacctggcaatttcgggcttggttctcatcggcggcttctgcttgaggctgagtttggttgaggccagaatacatacgagcatctaaaacgaggtagcatgacagcaaaaccgataccgacattcgagatagacgaaagcagcgatttgccgctgtgggttcgcttgcgcgacaggttggtgtatctgatcaataccgggtattacaagccgggggatcagctgcctacggtacgcaagttcgcagcggagctctacatcagctacaacacggtcagcaaggcctacgttgcgctcgaacgcgacggatacatcgtgacgacgcaggggcgaggcgcgttcgtgagcgagcccgacgacatatcggatgcgcccgacgtggatgccatggtggaagattttgtgagcaattgccttgagaaaggcatggcctacgacgatattccgaaacagatcagcaaggcgatcaggaagttgaagagggaacatgaaaagaaacaaggcaagtaagagctcgtccgtcgatgaatcgcgcaagcgggataccgcccgccgcatcgaaatggaattcggcgttgcagctgaagcgtaccgttccgacccgagcaagaaggcgacgcgtaacggggcgcttgcgttgcagatagcgattgccgttgcagtgttctgccttgttatctggctgttctatctggctttttccgaggtgaacatcgcagcgatcgcagtttccactctgctgggtctggcggcgctttcgtcggttcacgtagcgcttgactgggagcgcatggtagtgctgcgcctggggaaattctcccgcgttgcgggcccgggtctgttctttacgattccgctgatcgagtactgttcgttgcgcgtcgatcagcgcatgatgatcacgccgttcggagcggaggaaacgctgacgtccgatctggttccgcttgacgtggatgccgtgctttcgtggatgatatggaaccccgagcgcgcctgtaccgaggtcgaggactgctatttcgccgttgcgctggctgcccagaccgccttgcgcgatgcgatagggcgtgctcccatatccgaggtcgtcgtgaggcgcaaccagcttgatcacgagctgcgcgttgcgatcgaggagaaggtgtccgactggggagtgacggtcgttgcggttgaggtacgcgatatcatcgtgccgagcgccttgcaggatgttctttctctcgaggcccaatccgagcgccgccggaactcgagaatcatgctcatggaggccgaaaaggacgtttcggacattctttccgaggtggccgatcagtaccgcgacgacgaggttgcgcttgagctgaggaagatgcacctgatccacgaaggtatccatgagaacgctggcgccgtggtggttccgagctcgtatacggaaggttttgccccttcaccaggggatgagcacgctcgtaaatgatgtgggtacagcgcactagtctaaaagtagaataatgacaattcaaaattgtcgcacaacaatcttgaatgtcgcacgacaatcctgtataacatgtagtgggagaaatcagctgattccagaataagacgtgatgccgaaagcgctttcgggaggtaaaaggcctattgaaagcgagggcgttatggcctcatgtctcgggcaacgaaatgaggaggaatcatggctggaaacaagccatctgcgcttacaagacgagccttcttgaagaccaccgcgttcaccacagccggtgtggctgccttcggggcgcttgcgggctgcagttcaaacggggaagggaacgatcccgtcgaagagggtggcaccattggggttgctgaggaaacgtatttccaaagctgcatgggcaattgttcgggatggggttgcccgttttatgttcatgtgcgcgacgggaagatctgcaacattaccaaagccaatttgaagtgtcccgatgggtcgttgagcccctatcaggaaacatgcttgaagggctatgcgaacatcgagcgcatgtattcgccgacacgcgtccaatatcctatgcgccgcgtggatggaaccgagcgtggggctggcgaatgggagcgcatctcgtgggacgaggctatcgaggaaatcacatcgaagtggaaagagctgcaatccgaattcggcccgtctgccgttgccttcatgagcgggtcgggaagcggtatggctacgatatcttacacgggtcggctccaagcgcttatgggcgccatgaccattgcgccctgttacgacaacacgggaatgtacactcagatgaaccatggtgggttgagcgcactgctcccggggcataacgagcatcgtgacattgtgaacacggagaacctctttatctgggggacgaatccctccgagtccatgatcgtcgattatcatttcgtatcagaagcaaaagaaaacggtgcgaaggtaatcgtaatcgatcctattttcaccacttctgcggcaaaagccgatatgttcgtctcgattcgccctggaaccgatgggctgctggctgccggcatggcgctcatagccatccgtgacggcaaggtcgacaaaacccatcttcaaactatgacggttgcaccgtttttggtaaaggatcaagacgggctgtatttgcgtttgagcgacatcggcaaggctgaggcgggaagcccggacgatcgcgtgctcgtgtatgaggatgggaaagctgttgcgttcgatgctgcaaaagaccccgaaatcgaaggcggttttgaggttgaaggcgttgcggtgaagcctgcataccagatactgctggaccgtttgaacgagtgggacctcgaaaccatttcgaggtataccgacatacctctcgagacgattgaggaattggcgcgcatctacacatcggggttgtcgatgatcttcacgggatttggccccgatcactatgcaaacgggcaaaccgcatacgacggcatgtttgcgcttgccgacatcaccggtcaggaagccaaacacggagcaggcattgcgtgcagcgacttcagcgctcccagtgttcaagggtatgcgagtacggctacggccgatctcgttgatgtggttccggggccgacggtccatgcccctcatctgcatcagctcatggaggaaggggttctgggcgatatcgtgggagctcctaaggctgcctatatatacatctgcaacccgatcggaaacgagccggaccggctcaagtggatttcttctttgggtgccatggaacttgtcgtggtttcggatatgttcatgtccgaaacggctacgtacgccgacatcgtgcttcccgtttcattcctctttgagcgcgatgatatcggaacgagcgcaaaccccttcatcaagttgtcggagaaagtggttgatccgatgttcgaatcgaagggggatttcgagatcatcacattgctgggcaaggcgatgggctttgaagataagtttacgcaaagcgtcgagggcttcctcgaatcgtgtgttacaaacgaggtggcagcagctgcgggcgtcacatgggagaggctcaaggaagagcatgcgatctggtcgtacccggaagagcccgttgtggtggggctcaatgcgatgccccttaccgcatcgggtcgtttcgaattctatcacgagggcatacagcctatggcgaacgtcgggcaggaatgggacatgatcaaggaatcatgctggttctgggagcctcctcttgaggcatggtacgaaaacgaattgttcgaacggtatccgctcacgttcatcagcgagcgaagcaagttcaagacccacaccatgttcaataattccccgatgatcctcgaactcgatcccgagccctatgtgaagatgagtccggcggatgcggaagcccgcggcatcaaagagggcgataccgtgcggctttacaacgatcgtgggttcgtggtactcaaagccgtcatcaacgcgggttgccgccagggcgtccttgtaatcgatcacggttgggaagaggtcaactttatcgacggtcattactccgatctgtcttcctgcgcttcgtggcctcgcttcgagcaggataactggttcgactgcttgtgcgagatggaaaaggtccagtagggggttatcatgcaatacggaatggtcattgatttgaagaagtgcatgggctgccaaacatgcgctacctcgtgcaagcttgccaacaacctgccgtctggcaactggtggaacgtcgtgtacaccgacggcggtgaaaccatcgatacggcttcgggtgagtacccgaactgtacgcttcagcatcgtccggttgcctgccagcattgtgcagagccgtcatgcgtggcggtgtgccccacgggtgcgacatacaaggacgaagaaacgggcatcgtgatgcaggatccggaaacctgcatcggatgcaaatcatgcatagaagcatgcccgtataacgtgcgcgtctacaacgacggcgagcctgcctacgcgctcgactttgcggtggggtacgtcgatgcacccgcccatattgccaacacggtcgagaagtgcacgatgtgcgcaaacctcgtcaagcaggatgagcaaccgatgtgtgtgcaggcatgtgtgggatatgctcggtatttcggggatttggacgaccccgaatccgaggtctcaaagcttatcgtcgatcgcgatagcatgcagttgcttgcagagcaggggacgaatccgtcggtctattatctgaaatagattgagggagcttttgatgggcaaggggccttctggaaaacagagggtccctttttcaagaaggcccgcacatttgaaaggaaagatcagatgaacttcatcatcgttctcgtttgcgcgaccgtggctgtcttgcttttaagaaagccgctgatgaaatacccgatggtcttttatacgctcgcggtgctccttaacatcatgtacgttgcccacgcgttcgttccgtacccggagcttgtgcgacgtgggctgttcctgctgatgcaaaaatgcacgctttcgcttgctctttttaccgtcgtcatgttcgttggcgtgtttcgcaaggattcgagggcggggctttctttgcgtcccgttcgtgccgaactgtccatccttgcctgtcttcttgcggttggccatatggctatgtatctgctgtcgttcgctccccgtttggcggatatcggcgcgcttgatggaaggttcgccctgttcttcgcgacagctatggcattgctcgcgcttcttctggtgctgggcgtaacgtcggccaaaggtgtgaagcgtcgcatggatgcaagtgcatggaagaagctgcagaagtgggcgtacgtgttcttcgggctgatttacgtgcatctcgtaagcatattgttgccttccgcgctgctgcaaggagtgacggctcaaatcagcattgtcgtgtataccgtgctgttcggctcgtatgcgacgctcagaatctatcgtgcggtttccgatcgggtggaggatcgagcgaagctggcagaatcggttgcatagcgaacgcggcattgtatcgggtgtttttgcatcgtctgatatgatgccgtcgtttctgcgctcgtcggctgggtgccgtcgtcgcgttgtcgagcaacgttgtcgaagacaaggatggggatttgcttcttcgggagcttaagttagaacttggggatatcaccctgcttcctgattcgcctcccagcatcattcccgcgtgtccacgatgtggatcagctcctgttgcgaattgatcgtgagcttctggtagatgtgctggatgtgcgttctcgtcgtgggcctcgcaatgctcagctctgccgatatggaatcggcatggtagccctttgcgagcaagacgagcacttcggcttcgcgcggcgtcagcccgtacgattgcgatatggaatcgcagcgatcgcggaatcgcctgctgcggaattcgatctgctcttttccctccttggtggatgcgtgctgatcgtcggtgctgctgtacgtgcatagctcgaggaaggcgaacgccacgcacaccaaggctacgagcgctgcgacgataaccgtgaaaacgtcagagcttgcggtaacggcgatctcgcatacgatggctccgatgaaaagtccgaaccaccccggcattttctccttcgaaaagacctcgatcggcccacggtgcttcgacgacgatcgacgtgcggtgttgtaccagctgacggttgccgtgaaaatggacgtggcgatgatggggatgctgcagagtatgtagcttatgattccgccgagggggaggaacagcaggggagcggctatgggcacgaacccgatgcggcgaatgtcggcccccctgctcaacacccccgcagagagggcgatgagcgcgatggtgcagcctatcattccgccgatcgctccgtagcttaccgacatcgttccaatcgattggagcaggatgatggcgaacccgaagttgactccgcacgttgttgcgtaaacaacgcgcgaaacggttttgagggtgatgcgggcgggtgcatcggatccctcttttttctccgcatcgtcgtcggatgcgtcttcctgtcttctctcaagcatgtgcagaggcattttgctggcgaaaagcaggaacgccagcatgccgatggtggtggcggcgcttgcgaatccgagaaacagagaagacgccgtgttgtcgaacggtattgtgagcgagtacaggaagaacatcgagaagccgatcacgtacccgacggccacaacgatggccgtccatgagtcgaaacatgcgctgaaatagagagcccatgcgaacatgaggaaggaaaggctcaggccgtgtgcgctccaggcgattataccaatccataccggtggggcagccaacaggggaaacagagacgaaagcagtaaaacgaccagcgctgacgctgcgccgatgccgaggacgaggatcgggcggttctcgagacggcggtacgccttcgttgcaaccaggaaacttgcggcgagaacgaagaatccgcataccctcatgagccagagcgagtcgcttggaaagtaaggtgccgcgaacggaagggcgccgaagatccccagaagttcccagaatatgtagcatgagaagccgagcatagccagaagcgaggccgcgctgaacggcgccttgggtttgcagccgcttcttttttccggggaccgatcaagaaaacgtatcatggttgcctttcacttctgaacgggaagccaatggtgctgcaaatcatgctctcattctatcggaacacctcgacgttgggcatcatcttggggtgatgatgcggttggaatcgattgcatcgccgaggttcccgtgcctgttccatgctggaaaacgggcgtatcgaaagaaatattcgagctatctgatcaggcgattcatcatgcggtgattatgccttcgagcgttaaaggtcaaactggcatgatgcgcctttcccatttcgttttcatactgcgcagtcatacgccttgctttgcgaaggcatgcaggcgtcgatgacgaaaggaggacgtatgtgttttaggccaccaagcgtcgatgaggggggagagtcggtgtgctcttcgtgcggggcgacgaatccgccggggagcgaaacgtgcacctcgtgcgggaaaccgcttttgaaggcgcccgccgccgccatgggccgcgcgggcgcgccgcctgttcccggtgcccctggagcccccaaagcgcccggcgcgccgaagccgccgtcggtgcctcgggttccgaagccgtagcgcaaaacgcaaactgcaaagtgaggaggatgtcgtgagcaacgaggagaagaaaaaggatatcgcagcggaaaagcagccggaagctcccaagggccccggtgcgaagaagcccgctccgccgaagccgccgacaaagccggcggcaccgagcgaaagcaatatccaagataaggatgccatgcctgacctcgatgcattcaacttcatgaagtggtaagaagacgagagggaacattatgggaagtgcaactggtaaaacaatcgtaaagggcatgggtttttgcgcctctgccatcggcgcgaacgtgtgcagcgtcgacgtcgacgaggacgagggcaggatacttcgcatccgccccttccatttcgacgagaagtacgacgacgatcatttcaacgcatggaagatcgaggcgcgcggccacacgttcgagccgggatacaaagtggtttccgggcccctgtcctacggatacaaaaagcgcgtgtattcgagaaaccgcattccctatccgatgaagcgcgtggattgggatcctcgtggcgagcgcaatccccaaaaccgcggcaagagcaaatacgttcgcgtatcatgggacgaagccgctcggatcatcgccgaggaaatcaagaggattcacgacgaatacggcccgctttcgatcctcgtccagggcgacggccatggtgaaacgaagttcgttcacggaacccatgggtgccagacgcgcatgctcggtctgatcggggactacacgctgcaggcgcgtcagcccgacagctgggaaggctggtattggggcgccaagcacatctggggcatggatccgctcggtcagcagaacatgcagaacaacgtgatcaaggatatctccgagaacggcgatgcggtgctgttctggggtgccgatccggagaccactccgtggggttggggcggcatgatggcaagccgtctgtgcttttggttcactgaaatcggcgtcatgcagatccacatttcgcccgacgtgaactacacgaacgcggtgcacgccgacaagtggatccccgtgcttcccaacaccgacgctgcgctgcagcttgccatcgcctacgtatggttatcggaaggcacgttcgaccgcgattacctcgatacccactccatcggattcgataacttcgcctattacgtgatgggcggcgaagacggcattccgaagacgccgaagtgggccgagaagaagtgcggcgttccgtcctacaccatcaaggcgcttgcccgctactgggcgaagcacgccgtttccatcgcccactgcaacggcgggtcgttcatccgttcggctttcgcccacgaacccgcccgtctcgaagtcgcgcttttgggcatgcaatccctcggaaagcccggcgccaaccagttcaagttcatcgaatggtcgcttttcggcatggaaagcgtgacgcccatgccaccgtcggtcgagataccgaactgcggtcccgcgtttcgcggccggcagtattcggtgcgccccagcatcatccccaagacgatgatccccgaggccatcaccaatccgcccgttcagtggtacgggcacatcgccgcaggactgcctcgcgaagaccagttcgtcgggccgctcaccttcccgctcgagggcaaagagcgcatccatatgatctggtcggacgctccttgctgggaaacctgctggaacggcggcaacgagatgcaggaagcgctgcgccacgagtccatcgagtttctgctcatccagcatccctggatggaaaacgactgcctgttcgccgacatcctgcttcccatcaacacgaagttcgaagaggaggacatcggcaccgactccgacaacggcatgtggagcgtggtctactacgagcagcaggccatcgaatctttgggcgaatcgaaatccgatctcgaggctgtcgaagaggttgccaagaaactcgagcagttcggcggcatctacgaggatctgcacgctcgcatgatggacggcggcaaaaccgtcggcgatttcatcaaggccggattcgagaataccggcgcttccgagaagctctccttcgaggagttcaaggagaagcagtattacccgttcccgacgaaggaaaaatgggaggatctgcctgtgggcctcagccaattctacaaggatcccgagaaccatccgctcacaacgccttcggggaagctcgaatactactcgacggccctcgccgacatctttcccgacgacgagatccgcggccccattccgcgatggatcgaagagggcgacggccacgaggagcgcatcgattcgaagcgcgcgatcgaatacccgttcctcatcgtttcgaaccatccgcgttggcgcgtccatgcaaactgcgatgacatcacgtggctgcgcgagatccagacatgcaaggtggtcgggccggacggctacgcctacgagcccgtgtgggtgaatcccgtcgatgccggcaaactcggcctcaagaccggcgatgtggcgaagatatacaacgagcgcggcggcgtgctcggcggcgtcatcgtgtccgagcgcatcattcccggcgcgatctaccaggatcatggcgcccgcgtcgacaccatcgtatcaggggtgggcggcctcgaccgcggcggcgccaacaacctcattgcgccgtcggcgaccacatcgaagaacgcgcatggcgaagtgacgagtgggtttctcgtcaacatcgagaaggtcgacgtgttccagcttgcggagcagtatcccgaggcgttcgggcgtgcctacgacccggcatccggtgttgtggtggacgaatacatcgtggaaggaaactagcatgggcaaaatattcgtaatcgatccggcgaagtgcaacggttgccggaactgccagatcgcctgcaaagacgagcactgcgacaacgactggtctcccattgcgctgccccagcccgataccggtcacttttggctcaacgtcgacgagaaggtgcgcggcagcgttccgaaagtaaaggtgtcctatgttgtgaggctgtgccagcactgcggcgacgccccgtgcatgaaagcggcgcccgaggccgtgtatcgccgcgatgacggcctggtgatcgtcgatcccgaaaaggccaaagggaagcgcgagcttgtggaggcgtgtccgtatggagcgattttctggaacgaggaacttgcggtgccgcagaaatgcacgggatgcgcgcatctgctcgacgatggctggtcggtgccccgatgcgtcgatgcctgcccgcatggggcaattcgtttcggcgacgaggaggatttcgccgccgagctcgaagccgccgagtttatcgctcccgagcgcgcagacgccgacaagccccacgtatactatctgaatctgccgaagcgcttcgtggcgggcatcgtggtcgatctggaatccgacgaggtggttgccggcgcgcaaatcacgctcgagaaccctgaaacgaccgagatcctgcaggcggagaccgatgagttcggcgacttctggttccatcaggtcgatgccgcgctctacaacgtgtacgtcgaggccgaggggtatatgacgcgtatggtgaaagcggatgcgacggacgaggattgcaacatcggtccgatcgacgtgtttgcggctgccgagtagcgcgaaaagctgagccgccccaacgcaaggcggctcagctcggattcttcaacgcaaaatgttaggggaacatatgtcaaacacatcttcaataaaacagatcgccggtttggtgattgcggcgattttggtagtcggcgggctgttcctgccgggaacgggcgatctgacccacgaggggattttgggccttgccatcctgctcgcaaccgtcgccctgtggatatgcgaatcgatacccatgggcgttgcgggccttctggcgctcgtcgtggcgccgatagtcggcatcgcggaaatcaacacggtcttttccggattcggcacgaccaccgtcatcttcaccatcgcggtattcggtctcacggctatcgtcatgaagtcgaatctcgcgattcgattgaccgctgcgatgacgaaatggtcgggagcgaactcgaacaagctcgtgcttgcgttcatgtgcgtatcctggctgctgtcgacggttatgaacgactcggcggttctggtgctcgtcatcggcctatccatgatcgttctcaacaacgcgggccacgagatcgggaaatcgcggttggcgaaggcgttctacatcggcatcgcgctttgcgcgttcatcggaggcggtgcgacccccgcgggatcctccatcaacgtgctcgtcatcggcatgctcgagcaaacgatggggcagacgatcagcttcgttgactggatggtggcctgcctgcccgtgtgcctgctcatggttccgatcacgtggtttgccgttatcaagatcctcaagcccgagccgatcgagcagaaggatctcgaagagctgcagaagcgcgcaagggaactggggcctttggctcccgaagagaagaagacgctcttcttccttatcggcatgcccgtcctctggattgccggctcgtggatccccgccctcaacgtgaccacggttaccgtgctcggtcttgccgcaatgtttcttcccggcgtcaagctgctcacgttcgaagagttccagcgcgaggttccgtggacgatcgtcatcatgatcggcgcggtgctgtgcctcggcgggatcgtcaatgcaaccggcggcgttgcctaccttgcaaacatgttcctgtcgacgggggtcacggagctcggcggattcttctcgctgctgctcatcatgctcgccgtgtacgcgttccacacgctcgttccgatcgggcctgcgttcatcacgctgctcgtgcctccgctgatggcgttttgcgtatcggttggaatgtcgcctgccgtgccgggcatgatgctcgcaatcctgctttcgggcaatttcctccttcccttcaatccgggaatggcgcttgcctaccgcgataactgctggacggcaagcgagctgttcaagaccggcatcgtcccggcgatcattttcgtggtgcttctgagcgcctggacgccgttcgccgcaggcctcatgggcatcgccatgtagctttaggcaaacaatcgctcacggaccttccggccggcttggctggaaggtccaggggatagggggaattatggttcgcggtagcataaacaaaaagcatgtcggcatccctcttgcgcttgtcattttgctcatcgggtggtttctgcctcctgtcgaggggctcacccatgaggggatcgtcggcctttcgattctgttcgcggccgttgcgatgtgggtgtgcgaaacgctgcccatgggcgtgacgggccttctcgcgctggtccttgcgccactgctcggcatcgcggaaatcaacacggtcttttccggattcggcacgaccaccgtaatcttcgccatggccgtcttctcgttgacggccatcgtcatgaaatcggatctcgccattcgcctgacggggtttctcgtgcggatcgccggcagagactcccgtaagctcgtgttggcgttcatggttgcaggcggcctgctttctgctgtcatgaacgactcggccacgttggtgctgtttctcgggttcgccgatacggtgctggaaaacgcggggcacgtcaagggcaagtcgaaccttgcgaagtgcctgtatctcggcagcgccttcgccatcttcatgggaggaatggcaacgcctgcgggtgcgtccatcaatgtgcttgcgctcggtttggtagagcaagcgacggggcagacgattccgtttctgtcctgggtccttgcggctgctcccgtcgccatcgtcatgatcccgatcatctgggtcgtcctcaccaagatattcaagccggagcctatcgacgaggagagtctgcgcgtgctgacggcgaaggcatccgaactcgggtcgctgacgctcgaagagaagaaaacgctcgttttcctcttgggcgtgccggtgctgtggataatcggctcctgggtgcctgcgctgaacgtgacgacggtttccgtcgtggctcttgcgctcatgtgcgcgcccggcgtcaggttgctcacgttcgacgagttccagcgcgaggttccgtggacgatcgtcatcatgatcggggccgtcatctcgcttggcggcatcgtcgggtctacgggcggcgtcgcattcctggcgaacctgttcctgaacagcggggtcatggagttgggtatgttcttcacgttctggctcatcgtggctgcggtgtattttacccattcgtttgtgccggtgggtcccgccttcgccaccatcctcattccgcctttgatgacgtactgcatgcaggccgggtattctcctgcgataccggcgattctgcttgcggctatcctgtccggcaacctgctgcttcccatcaatccgggtttggccctgtcgtatcgcgacaacgtctatacgttcggcgatgcgttcaaggcgggcatcgtgccggtgctctgcctgatcaccttgctcgccgcatgggtgccgttcatggtgggggtgctggggataccgaactgagatcgctggaatttttctgctggtaggggaccgaagggcgcttgtttgaaggcgagcgcccttttcttgataattcgcctgcgatttccagaaacaggcttgacgaagtgcccgtataaccgtaatataatcactcgcgtttgcagccggaaacaggtgcgtttccagttcagcgcaagagttactggggtgtcgtctaatggcaggacagcggtttctggtaccgtatgtgagggttcgactccttccaccccagccattttgcatagcggtggcaaggctgttgcaaggtttgtcgaaataggatcttgacgaaccgcgtagctcccagtaaactaccacgatgcgctacatggtcccgtcgtctagcggttcaggacgccgccctctcaaggcggaggtcgccggttcgaatccggtcgggactaccatgaaacttgaagagcccctgcaggtcgggggctcttttttcgcctatatccctcagctgcgatacagtccgtcaaacgccgtgcgcgaggcgcaggaattcgtcggccatggcctcaggggtctcgcgcatgccgccctcgagccagcagacgagcatgttgtagaacgcgcctgcgaagtagtacagctcgtagcgcgcgatggagttcgccggcatgtcgcctccctcgctgatctcgcaatcggtgacgacgtcgagcagtgtcgtgccggcatgcgcgcgatggaacgcgagcacgatgtcggcgtgctctcggtagaaccggaaccggtagagcacggcctcgcggctacggggcgcggcatcggcgggcatgccctcgtggtagaggcgggccatgcgatcgatgccgtagccgacgacgtcctccatgctgccgaagttgcggtagaacgacgcgcgcgccacgcccgagcgctcgacgagctcgactaccttcacccgtgagaggtcctttccctgcgctaggtcgagcaacgcatcgagcagccggtctttgaccagccggttcgcctctttccgcttgttcatgatacggttccctccgttttgtctcatgttgtcgggttcaccatgccatcctaacatgatacagtatgtctcatattgtatggcagactcaaaacgaaggcaaggacgcatgatcttctatttcagcggaacgggcaacagccagctcgccgccctccagatggccgagaggctgggcgatacggctgtctccctcaaccgcctcatcaagcaaggcgaaacgggctcgttcggctccgaacgagccctcgcgttcgtcgcgcccacgtactcgtggcgcattccccgcgttatggagcgttggatcgaaggagcagagttttccggttgcaaggacgcctacttcgtgctcacctgcgaggggagcgcgggcaacgcggcgaagtacgcgcggcggctttgcaagcgggtggggatttcgtttcgcggtctggccgaggttgccatgccggggaactacctggcgcttggccccacgccgaatgcagacgaatgccgcgcgatcgtcgaggaggcccggccgcgcatcgatcggcttgcggatctggtgggggagggaaaacctttccccgaaaaacccgtcacgctgaaaggccgcctggaaagcggtcccgtgaacccgctgttctaccgcttctacgtgcacgatgcaggtttcgcgtcgtcggaggcctgcacgtcgtgcgggaagtgcgcggcccgctgcccgctgggtaacgtagagcttgtgggcggaaggccatcctggaaggggaattgcacccactgcatggcctgcatcgccggctgccccgtcgaggcgatcgagtacaagaccgtgtcgaatggtcggcaccgccactacatcatggacgatgcgctgtgctgggaagatgcggaggcaccgcgatgaggttcgaacacgcggttctgatcgacgcggaggcgtgcatcggctgcggcctctgccgcgacgattgccccgcagggaacatcgtcgtggaggacggtaaggcccgcgttctggcgcaggattgcatcatgtgcgggcattgcgtggccatctgcccgcgtgcagccgtatcgatgacggggttcgacgacgagccgcaaaaaatcgaagagccgatggcgctcgatgaaaacgcgttgcttgtcgcactgcgctcgcgtcggagcatccgccgattcgccgatcgcgccgtggaaccggccgtcgtcgagcgcgtgatcgaggcggggcggctcgctcccacgggaagcaacgcccaagacgtgtcctacgttgtgctgcagggtgcgggcaaagacgaggccgaggcgtatgcggtgcggttgttcagacgcgtgctgcccctcgcgaaactggtcagctcgcttgcgcgcagggtcgatgtcggtgaccgtttcttcttcaagggcgcaccagtcgcccttgcggtggttgccaaggacgaggtggacggcgcgctcgccgccgcgaacatggcgctcatggccgaggcatgcggcctcggcgtactgtacagcggcttcttcgtcaccgcgacgcgcttctctttctccctgcggcgattgctcggtttgcgtcgcggccagcgcgtcgtggcgttgctcgtgataggctaccccgctgtccgctaccggcgctcggcaccaaaggaacccgcgtacgtacggaggccgtgagcccctgctttgacgacctctcacgtcgaatcctgttggggctatcgtaaaacttgaagagaccccgcagttcggggatctttttcgaatattgtttgattgcgacgaccgggtagatatagtcgcaaacgccaagaccgaactccgaggtgaggatggttcgccgcgctagaggtgctattgcttatcgtaccttcgtcgcgttttgcttttctgccggtatgtttcgaacaggtcgaacaattcttcgcgcttatggatcttgagcttccggtaaatatgggagacgtgcgacttcacggtccctggcgaaagcgtatagtaatcgcagacgtacgcttgcgtgtggccttctgcaagaaggatgagaacttccttctctcgcctcgacagcttgaagtcggatgccatatcatcgcagagctcttcgatctgcttggatggggtcggcaacgtttcgagtatcttcccgcgctccttcgtgctggcaagccgaacgaagaaaaacatgacgatcgcgagccatatagcaacagctaggaaagaaaactggtttgcgaaggcaacgtattcttcgtttccgagcatgtgtttgaggacgaagccgacgagcgcgccgccgaaccagaaaatgtttttgacgaatttctcggagaacgagagcagtgcttcgttgactccgaattcgtctttgcattcggatagttgcaccgatgaaagcgcgatccacgaaaaccagagtatcgggaccgccgccaaggtgagcggctcgtaggcggatccggcattgtgcggatagatcgtcaggagcgcaaagccgaacaggaggggtatcgtcgccaggaggggcatgctctctttgctttttcgtttaaggcagaaactgaggcatatcgctgcgcagagggtagctgcgacaaggatcgggcttgtgcggtgatctgcgattattgagtcgagcgcaaaggagccggttatgccgagacaggttcccacgaacgctcggcttatgaaaaacgatgtcattctgccgatcgattccttcctgaaggagcgatcaacgatcgatagcgtgctacgaccgatcaggaatggcaggggcgagacggtcttgaggaccagggagaggtagcggtccacttcttgcggcaggacaaggaaaatcccaagaagagtgcagcagaagagagcggctatcagcacggtcctttcagctgttttcttgtcgagcgaggcgaagttcaacccccaaaacagcaataggcaagagctcgatacgcccgttaagagcacgaagaccgaagcgaacgctggaaagccgcccaaaggcgtttcgaaaacggtaagcggaatcagcaatccgcttgtgataaaggccgccgcggctagtcgacgctgcgccgacggcctagcgaatcgtttgtaaagcagtatcatcgcaaacgctaccgcgagcgcgacggcttggatagccaaagcttcgggaaaggccgttccgcttgctgctttggtggcatgggagaacgtaacggaagcccagtaggcgccggcggcaaaagggctcgcgatggcgcaccatttcctaggatcagatatcaatgctcagcatcctccatgattcgcaggtgggttatcggggttattctatacgatcgcacatcatccgttttgttgtaatttcgcatggttccacggggtaagagcgatttcagccaataggaagatgctttcgctcacgcagatcggtagattcttggcgttcgattttccgtagtattgcgaaaggtagggaagacatggaacagaatagcaaggatcgggtaaaaggattatcgcgtcgcaacttcttgatgggtgctggggttgccgccttgggtgcagctagtttcggcgcggtaggatgctcgtctgcgaatgcggacgcggattccgataacgcgagcggagccgtgtcggtggactatgcgagtactgttgcgtggaatgcggaatacgatgtcgtcgtcgtcggattcggcggtgccggtggcgtcgcgtcgattacagcagccgacgagggggcgaaggtccttcttttggagaaaggtgctcttggcgaagagggcggcaatacgcgctattgcgagcaaaccctcctttccttcaaggactatgacggcggcatcacatttctgaaaagcatgaataggggctacgacacgtttaccgatgagatcgccgattttatggtgtccaatacgcttgagatgacggattggctcacgagtatgggggctcccggtattgtgagcatgaatgaaaaggttgctccgaaattggggacgcttgatggcgaaacgggcgactggctgagcgacgacggaaaggaattcgccgagtatcccgaaaggctcatgccgggtgggtcgaccgtcgaagtgctggctgttcagccgagcgccgagaacgacgagaagccgtactggaacctggttcggaagaacgtggtagaccgatcggattctatcgacgtttggatggaatcgcccgccgtttccttgatacaggatccgctgagcaaggtgattcttggcgtgaaggtttcccgcgcgggcgaagagctcaatgtgagggcgaagaacggcgtcgttctctcgtgcggcagttatgaagcgaatcttttgaaatacgaggactatgcgtgctatccggagatccatccctacggaacgctcctgaatacgggggacggcatcgatatggctcaagcggttggtgcgagtctgtggcacatggctgggatggccggaccccgatgggcacctttgtatccgaacagcgatcgggcgatgttcatgggtatgacccagcgcatcaccaacggcggaaacacgatttacatcggcgagaacgcgaagcggttcatggccgagtctggttggggcaagcacggcaagatcaactacggcgggacgttccgttcgcaaatcctcccgcaggtcgtctacgccgtgttcgatcagacggccaaggattccggcggcagatacgaggaggcggacgaatcgtttctcatctcggcagacagccttgaggaattagcctcggccatcgatgtcgatgcggcaacgctcgcggaaacggtttctcgctacaacggatatgtggatgctggcaaagacgagcaattcgaccggcatccgagcactttggcgaagcttgaaacggctccgttctatgcgatgaggctgtatgggtcgaacacgcattgctttggcggccccaagcgcaacacgaactgcgaggttctcgatacggaaggaaaacccatcccgcatctgtacagcgcaggtgagctcggcagcttctggatggacgtgtacgacggcggcggatgcgttgccgagaccttctacaccgggcgtgctgcaggcatgaacgcagcggcagcgaaggacgatgtgaagcccgtcgagcttgcgcctgtcgagccttcgattcaggagtacggcaacgatctgactgtcgacgccaccgcagacgttgtgttaggggagaacgagtacctaggagtcggccagggtcttcacggcgatgtcaaggtgaaggttggcgtcgagggcggcaagatcgtttctgtcgaagtgcttgagcagcatgagactgaggggataaccggcgaggtttggtcgacgatgcccgacgagatggtcgctgcgggcgttgccgaggtcgacaccgtcagcggtgcgacccttgccagcaacggtttgatagaggccgtgaacgacgctctttcacaagcaagctagcgtctgatcgcattctccatagcaccatgagtcttgaagagcctccgcagttcggaggctctttttacgttaagcgtagagcgaatcggggttcttcggacatacgggttgtctcggcgccggttcgaatccggtcgggactaccaaaaattagaagaacccccgcagctcgggggttcttttgcattgcagatcaagtgcggtttcgcggttattccaaccttacagtccgtctcggaagtcggcgggcacgtggctcgcatcgcagaacggcttgttgcgcgattgtccgcatcggcagagcgcatagcggttgcgcggctcgtagagcgtaccgtcggctgattcgagcgggatgcctccccttacgtacagacacgagctcacgttcttctcgggatcttcgagcagcgagatctctggttcgaaatcgggctctatcagcgtgccatcgccgttgttccgatggacgagcctgcctgcggggcagtcggtcgaggccttgaccgcttcgtccatcaaatatggatcgtccgacgcttcggtgagcgaccacacatcgccttcctcgcgatggcagaaacgggcgaatgcgcagcggttgtcgtcgaaaaggtcgacgccgccgcccggataaagatcggctcggtcgaggaaatcttccctcgaggcggtttcgtctccctggaaatgggcttcgatgtgggaaccgtcgcaaaacggcatgttcttcgagcgcccgcagcggcaaagcgcgtaggtttcttcggtttcgaagatgcggtcgagccgatattcccgatgtccgccgacgagtgtgatgatctcgcgcttgagcggcacgcggccgcatacgatgtaggggccgtctttcgtgatggtgatcttcatgccttcgccgcaggggctatcgggttgggtggtgccctccatgatatacctcgctttctcgtctgcctcaaaaagtgtctgcgaccaagtatattggggcctcggcagcggcggccggcatcgccgtgttccgttgccgaacggttgcgtcatcgccgctgctttcgaacaaaggcgagcagatggtcacgatcgttttccacccgctcgtcgatcacggcttcgagcgcccgatcgagcagccggccgatttccgggccctgtgcaaccccgagttcgatgagatcggtaccgccgatggcgagatctctgagcgagaacgcctcctgagcctcgatgatctgatcgagtatcctatcgagctcgtctgcgaccgcaactcttttgcggcattgcggcgcctgggccagcgagtcgcctctcttgagatcgcacatggcgcggaacaggtcgatgcgcccgtcgaggcggcgaagcatgcgcttgaccgccttcggggtcggctcgatcacatcgtcgtgatatctgaccagcaacagtacgtcggaggaaaacgacggggggaaggcaagctccttcagcacgggttttgcaagctcgatgctcagcttggcgtggccgtagaaatggccgacgccctcgtcgtcggtgaagaacgcccgcggtttgcccatatcatgaaagagcgcagcccagcggaccagggggtagggaggcgtgttctgcattacgtaggccgtgtgctcgaggacgtcgtactggtgataaggcgttttctgatcgaacccctgcatggcggttatctcgggcatgaaaaaagcgagtatgcgattgcatgccataagggcatcgtggattgccgaaccgcatacgaacccttggagctccttggtgatgcgctccttcgccacgctggcgagcaggggcgtgcagtattccatgcccctcatggtatcgtcctctatcgagaagccgagctgcgaggcaaatctgcatgcgcgcatgatgcgcagcgcatcctcggaaaacctccgttcgggattgccgacggcgcggatgactcccgcatcgatatcggctcttccatcgtgtggatcgagcaggccgcggacggggtggtaggctatggcgttcattgtgaaatcccgccgatcgagatcggccgcgatgctttggacaaatgttacggagtcggggtggcgcccgtctgtgtagggcccgtccacgcggtacgtcgtcgcctcaatgggttcttcgccgatgatcgcggtgatagtgccgtgcttcgtgcccgtttcgtgcacgcggaatccggctgcctcaaacgcgagcttcgcctcttgccacggcgccgaggtcgcgatgtcgatatcgccgccgtttctgcccatgagggcatcgcgtacgaagccgccgacgcaccaggcttcgaagcccgagcgttcgagcgcatcgatggccgcacgagcatgacggggtagttcgatagatgtgaccttcttgcccatggtgcatactatagcacgacataaggccacgtcaggtattgcgacaagagatgatcgctcctatcatgtaacacccgatggccgcttctgcgcagaggggagcgcgaccatggccgattacgtttcgagttcggcatgcaacggctgcaagccgaagcaccttcgggggcgaactcatttccaacgcccgaggcttttgttccttatgattcagaatcgggatgtcgtgcgtttcctcgttgctccatcgggctttggaaagacggctctcgctctcgaatacgccgaatcgattttcggattccgcgacgttttctggctcaatgccaaaagcccctgcttcctgcgcgatgtcgacaacgctacgctcggcacgcagctcgcctcccttacccggaaacgctcgcttgtcgtgatggaggatatccccgatttgacggctgagcgggccgaatcggtttcgacatgcatcgataaactgctcgaacggggatgggaggttatcgtcaccatgacgcccctgcggggatctttcgtcgataggcaacccgacggtacgcggatatgttcgagggatttccttgtaaccgaagaggagcagcgcatgttcgccggcgatgccgccttcggttctcgcgattcgatccccctgccgctcgccgacagcgtgcccggccttatgtggggtggatctcgcgccgaggccgatctgttgtgcggcatcgtggcggacgggcttcccgccgatgttctgctgggcgtgttcacgctgctcgtgcttcggaggggttttcttgccgatgcgaagatgtacgcgggccccttgaaaagcgatgcgcgggcgctgctcggcgaggagtacctgtttttgggcgtcgatgagcacgacgaacggttcgagacgcacgcatttcctatcgacgaggtggtgcatgcgttttctcgcgctctcggacgcatggcggcgagctcgtcgtttccggatgcggacgctcttgtgatgcggctcgccgatggattgctcgcgcagggcgcttccgagcgcgcttgcctgttcgtcgggggatgctgcaacgccgaaaagcggatcgcctggctcgggtcgagggcgaggaggctttcggctctcgggtgcttgctgccggcgcaccgtttgttcgaaagccgctcgatgcgactcaattccgataccgccgccgtgttcatcggcgaggcgtggcggctcgtcgggctcgaccgcgtgccggaggcgcttgccctcgccgagcgcgtgcttgcgaaagcaagcctttccgacgccgtgcggggccatgccgcgctgctgcttacgaggtacggcgatgccgattgccgccggaaatcggcagacgtcctcaaggggctcgttcggatggcgggcggcaacgacgcccgaaggaattcggaggcgatctctgtggcgctttccgacgggaaccgccgatgggaggcgctgggggttgcggctgtttggcttgccgaagacggtcgcgccgccgtttttctcgccgaggcgtgtctgggctgcgggaggacgggcgatgtcgagacgggcattctcttgtgggcgctcgacgccctgtcgggaaaagggctcggctcgctcgcccagcccgacggggccgatatcgaacgcgtgctggcgataacaggcgattacctgcgccgttgcgaagaagagggctcgttcggatacggcgaggcggcgctgctcggcgcatgggacgaagcgaaggcgctcgcttctcccgatgccctctaccccccgctcgtctccgtgaggatggtcgcccaaaagctagaggtgcagctgttctcccagcgaagcgcattcgaacgcgagcgtcgcgagacagactgcgtgcaggaagggacgatgcacggcgggcgaagggggcgggggatcgccctttccggcgactgcggattctcgggaacgcttcttcgcacgcacgagatcgtcccgacgcttcgcatctgcctgttcggcgggctcgaggtgcgcatcggcgatagcgaagtcgatcccagcgcgtttcgcaggcagaaagtcaagaccctcttggcgttgctcgcgctgaaccagggcaaggagcttctgcgcgatcggcttgcctccatcctgtggcctacgagttcgtcggcgacggcgcagcggaatttctacaccgtatggtcgattctgcgcaaagcgctttccctgcccggcacccaggagtgcccgtatctgattcgtctccagtacagctgccgcctcgacgcccgcacggtctcaagcgacgttgcggagttcgacgaactgtgcggcaagctcttgctcggggcgcccgacgccgaagcgtggtcggccgcctttgcgcggctcaacgagctgtaccgcggcgatctgctgccgagcgagggcggcaacgagttcatccttcgccagcgcgaagagtaccgtgcccgtctgatcgacgcgctcgtctccgcttcgacgaggctgttcgacgtcggcgagttgcaatcggcgctctggtttgcgcatgctgcggtgcgcaaggattcgacgcgcgaagatgcctacacggcgctcatgcaggcccaggtcgcgtcgggccagaggacggctgcactcgacacctatttcaagtgcaagcgctacctttcagacgagttgggcatcgatccttcgccaaaagcagtcatgctctacagttcgatcatcgaagcggagccgagcctcaaggggttcgttcccaggtcgtaggatccggcgcggcgcggcccaaagggaaggggcctgcgttgcgtcggaggcgttttgcgcccctctctcccgttcggcgaaaacaacgcgggacggcaacggcagtgtggatttcctttgacgctttacgaggtatgatagagtgattcggtagctttatcggcacattggccaaagagagaaagacggctcgtacatggcaggttttttatcgaaactcctcacgctgggcgaagggaagcagctcaagcgttacgaagatacggttcagaagatcaacggtttggaacccgggatgcaggagctctcggatgccgaactcagagcgctcactgcggcgttcatggagcggcagcaaaacggcgaatcgcttgaatcgctgctgcctgaagcgtttgcggcggtgcgcgaagctggcgtgagaacgctcggcatgcgtcacttcgacgtgcagctcatcggcggcatggctttgaacgacgggcagatcgccgagatgaaaacaggcgaaggcaagacgctcgtctccacgttggcgggctatctcaacgctctcaccggcgagaacgtgcacatcgtcaccgttaacgactaccttgccaagcgcgacagcgaatggatggggcgtatctacaagtttctcgggatggatgtcggcctcattcaaaacggcatgaagcccgatcagaagattccagcgtacaaggcggccgttacgtacggcacgaactcggagttcgggttcgactacctgcgcgacaacatggtgacgaaggctgcgaaccgcgtgcagcgcggccaccacttcgccatcgtcgacgaggttgactcgatcctcatcgacgaggctcgaacgcccctcatcatttcgggcgccggcacgcaggcggccgagacctacaacaagttcgcccgcgtcatgcccgggctcgtgcgcgatgtcgattacgacatggacgaagcgaagaagaccatcaacgcaaccgagagcggcctcgagaaaatcgaggcgatgctcggcatagaggatctgtacgccgatccgtcgggtcagcttgcaaaccatctgcagcaggcgctgaaggcccagttccttttccaccgcgatgtcgactacgtggtcgtcgacggcgaagtgaagatcgttgacgagttcacgggccgcatcatggagggccgccgctattcagagggtctccaccaggccctcgaagccaaagagcatgtgctcgttcgcgaagagaaccagacgcttgccaccatcacgctgcagaactacttccgcctctacgagaagctctccggcatgaccggtaccgccatgaccgaagacgccgagttccgccaaatctacaatctgcccgtcatggccatcccgccgaacaagcccgtggtccgcaacgacgaggacgatctgatctaccgcaacatcgatgcgaagttcaacgcggtcgccgacgaggttgcggctcgcaacgccgtagggcagccatgcctcatcggcacggtgtcgatcgagagttccgagcggctttcccgcctcctcgacaagcgcggcataaaacacgaaaccctgaatgcgaagaaccacgaacgcgaggcgcatatcatcgcgcaggccgggcgcgtcggcgcggtcacgatcgccacgaacatggccggccgcggtaccgacatcctgctcggcggcaaccccgaggtcatggccgaggacgtgctccgtgcgcgcggcttcgatcccgagttgcccgaaggcgccgaagtcgaagagggcaaggcccccgctccgtcggccgaagagcgcgcaagcgcgctcgaagaggcgaaggcggttacgagcgtcgagaacgagcgtgtcatcagggcgggaggtttggccgtcatcggcactgagcggcatgagagccgtcgtatcgacaatcagctgcgcggccgttccggccgtcagggcgatccaggtgtgacgcagttctacctctcgctcgaagacgacctcatgaggctcttcggcggcaaccgtatggattccatcggccgcatgatggagaagaccgatctttccgaagatacgcccatccaagccggtatggtttccaaggccatcgaaagcgctcagcgccaggtggagagcatgcacttcgcagcccgtaagaacgtcctcgaatacgacgacgtcatgaacctccagcgtgtcgccatctacgaagagcgcaacgccatcctcgacggcaaggatctcaccgaccgcattcccgagatcattcgcgatgcggccgagggcgtcgttgccgaaaactgccccgaaaaggttccttccgacgactgggactccaaggcggtcgagctttgggttgcaaacatgaccggtcgcaccgatttcgaggtttccgcgctcgatcacgacgacgatcccgatgccgttctcgaaggcatcgtcgatttcttgcagagcgtctacgacgagaagaccgatatgctcggcgaagccgccatgaaaaacctcgaggcccaggtgatgcttcgcatcatcgatacgaagtggatggcccacctccaggagatggattacctcaaggcgggcatcggcttgcgcgctttcgggcagcgcgatccgcttgtcgaatacaaaaacgaagcgtacgccgctttccaatccctgaccgtttcgatgtacgaggatttccttcgcacgctgctgcgtctgcagattgcggtcaaggaggttcccgaggagcgcaacccgctcgagggcaaggtgagctattcgtctcccgaggcggctttgaacgatacggccacgaccgcccagcgcacgcaggctgcggccgcgcaggcgaagggcatacccgccgcgccgccgaaagcggcgccaacgggaaaggccaagacggtggagaaggacaaagacgatccgttcgccaacgtcgggcgcaacgatccgtgtccgtgcggttcgggcaagaagttcaagaagtgccacggagcgaacctctgacgtgcgattcggcttcgcggtgctgcggcatcaggttcgggtccattcgttaacggcggggaagcatgactgacagggaattcaaagatatcgagcaggtggccaagcgcgtcgaagacgcgaagggctacctgcatatcgaacggaaaagcgaggagcttgcatcgctcgatgaaaccatcgcatcgccgggtttctgggatgatgcgaaccgcgctcaagaggtgtcgaagcgggcgagcaatctgcgcgacaccatcgaggagtaccgcgaggcggaaacgctcctcgacgatgcccgcgcagcgctcgaactcgcttcggaagacgaggcgttcgaggaggaggccgcccaagcgctcgacgcgctcgacgcgctgcttgacaggctcgaggtggcgtcgtggttttcgggccggttcgattcgggcgacgcgatactcacggtcaatccgggatcgggcgggctcgaggcccaggattggaccgagatgctctaccgcatgtacgcgcgctatgcagagaagaagggctggaaggtgcgtgtgctcgacctcgtgccgggcaacggcatcggcctcgataaggcgaccatccaaatcgaggggcgcaacgcctacggcatgctcagaagcgaatcgggcgtgcatcgcctcgtgcgcatctcgccgaccgacgacaagaagcgccgccacaccacgttcgccggcgtcgaggtgctgccggtgcttcccgacgatatcgaaatcgatatcaatcccgccgacgtgcgcgtcgacgtgtaccgctcaagcgggccgggcggccagtgcgtgaacacgaccgactctgcggtgaggctcacccatgtgcccagcggcatcgtggttacctgccaaaacgagaaatcacagctccagaacaaagaagcggccttcaaggtgctgcgcgccaagctcttcgaactcgaggagcgcaagcgcgaagaggagcttcgggaactgcggggagagcgtatggaaaactctttcggcagccaaatcagaaactacgtattgtatccttatcaattggtgaaagacgtgcgcagcaacatcgagacgggcaacgtcgacgcggtcttggacggcgatatcgacgagttcgtgctcggctaccataagtggcgcgtgacgtcgtgaggtgcaggctgagagaagaaggacgggcatggaattaaccgaggtcgaagcgaaggcgcgaaacatccgcgagagcatcgtgcgcatgatcgccgaagcgggaagcggacatccgggcggatcgctttcctgcgccgacatactgacggcgctctatttcgggggcgtgctcgtgcacgacccggcgcatccgagcgaccctcgcagggattacttcatcttgggcaaggggcatgcggctcccgccctgtatgcaacgcttgccgaagcgggttactttcccaaagaggagctcatgacgctgcgcaagctcggcacgcggctgcagggccatcccgattcgaacctgctcgagggcgtggaagtgtccacgggatcgcttggccaggggctgtccatcggcgcgggcgccgcagcgggtctgcggctcgacggattggacaaccgcgtgttcgtcgtgctcggcgatggcgaatgccaggaggggcaagtgtgggaagcggctatgttctccgcacacaagcgcctcggcaacctgatcgcgatcgtcgatgccaacggcctgcagatcgacggcgcgtgctgtgacgtgtgctgcgaaggcgatctgggcgggaagtttgcagcgttcggctgggatgtatcctacgtcgacggccacgatatcgcggcgctcgtcgagcttttcggcaatctcaaggccgctgggggagaaaagccccatgcggtgatcgcggcaacggtgaagggcaagggagtttcgttcatggaaaaccaagcgggctggcacggcaaggcccccaacgcagaagagctcgaaatcgcgcttgccgagctcggcgcggaaggaggcaaccgtggttaagttcgcatcgcccgagcaggcatcccagaagaaggcgactcgcgcggcgttcggcgcgacgctcgccgagcttgccgccgaaggattccccgtcgtcgccgtcgacgccgatctgaccggttcgacgactacgaagaagttcgcccaggcggcaccggaaaacgagggcaagctgttcaactgcggcatcgcagagcagaacatgatcgacgtggcggccggtctcgccttgacgggccacatcgcctacaccggctcgttcgccgtgttcggcacgggccgcgcatacgatcagattcgcaacaccgttgcctattccaagctcaacgtgaagatcgctcccacgcatgcgggtgtctcggtcggccccgatggcggcagccatcaaatgctcgaagacgtgtccctcatgcgcgggcttccgaacatgacggtgctcgttcccgccgattatgcggcggcacgcgccgccatcaggcttgcggccgaaacgccgggcccggtgtacgtgcgcatgggccgtgcttcggtgccctgcgtgtacgccgacgacgtggagctcgaggtcggacgcgcctatgtgctgcgcgaaggagccgacgccacggtcgtcgcgtgcggcgtggagatcgacgaggccctgaaggctgctgacatgcttgccgaagagggcgtatcgatcgaggtcgtcgatgcgttttccgtaaagccgctcgatcgtgcgaccatcgtctcttcggtcgagaagacggggtgcgccgtcgtcgccgaagagcattcggttgtaggcgggctcggatcggcagttgccgaggcgcttgcggaagagcacccggcgccttgcgagttcgtcggcgttcgcgatacgttcggcaagtcgggggaattctccgagctgatggcgtacttcgccctcgatgctgccgccattgttgaagctgtgaagaaggctatcgccagaaaagcgatctgctagaattacggcgtctcagtatattgactattcgaacggagcattctgtgacaaacgataatacccgaggggcttctgcgcgcacgggtgcgcacgccgggcgtccgaggcaggcggcttcgcagctttctgcatcgcttcccatgctcgacgtagacgatatgccccaaccgatgggcacgcccgtcatcacgtttgatcatgtgaccaaagtgtatccggctcagcccaacaagcccgccctcgacgacatcacgttgcagatctacgcaggggaattcgtcttcctcgtgggtcattccggatcgggcaaatcgacgttcatccgcatgcttatccgcgaagtgaagcccacgcagggctatatctacgtagctgacgaagatctttcgaacatgcgcaactggcgcgtaccgtatctgcgccgcaacatcggctgcgtattccaggacttcaagctgcttccgaacaaaacggtgttcgagaacgtcgcgttcgccctcgaggtaatcggcaagagccgccacgtcatcaagacgcaggttcccgaggttcttcgcctcgtcggtttgcaggacaagctcaacaagcgccccgatcagctttccggaggcgagcagcagcgcgtttccatcgcgcgcgccatcgtgaacaggcctccgctgctcatttgcgacgagccgaccggaaatctcgatccccaaacatcgcgcggcatcatggatctgctcgagcgcatcaaccgcacgggcaccaccgtgctcgtggccacgcatgaccgtgaaatggtcgacaacatgcgcaggcgcgtcatcgcactcgacaagggccacttgacccgcgaccaggacaggggggtgtacggtttcgatgtctagtctgctgtatttcctcaaagagtcgcttaccggcttttcgcgaaacctttcgacggccctcgggtccatcgtcaccatcttcctttcgctgctcatcatcggcatctttctcatcggcggattcatcgtcgagaacgtcgtatcttcagtggaggacaaggtgtccatctcggtgtggctttcagacgatgcgagcgacagcgatatcacgacgctcgagagctacattcaaggtctcgagggggttgagagcgtgggcttcaccaccaaagagcaggcgctcgagaacttccgcaattcgatgacctcgaaccccgagatcgtcgaccagcttgacggccagaatccgcttccggcttccatcgaagtggagctgtccgatcctcagatggtcgaaacgatcgccggtcagatccagtcgaacgctacgtttaccaagatctgcgacaacccgggcgatccggccgattcgctgaaatacggtcagaagagcgtggagcgtctgttcgatcttacgaactacatccgctacatcggtatcgcgctcatcgccctgctgatcttcatcgcaatggtgttcatcaacaacaccatcaggctcgccatcctggcacgtcgcaaggagatcgcgatcatgcgcctcgtcggcgcctcgaacggcttcattcggggacccttcctcatggagggcgcgctgcacgccattatcggatcgcttctggcggtcggatcgctcgagcttctgcgttccatagtgtttccgcagatctcgacggctctcgtgtggcttccgctcgatctcggctcgtcgacgaccttcatgatctatgcgcttctgatcgcggcgggtctgatcatcggcctcctcggctcggcgctcgccatgcgccgctacctgaaggtgtagcagccctcgcaaggcggcacggtcatggccaaacacggcgaaacaaacaagcttaaagcagcgggcgcacgcaatgcacggatcatcagaatactgacggcctgcatttgcgtgtgcctcgcttttgctgcgggcttcctgttgcgaggcgatcgcagcctgctcgagcggatcggattcgaatccctcatcgttgcaggcgagcagaatcccggtgctacggtgcacggcagcacctacagctccatctcggctcgcgtggccgaagtggagggcatccttgcaaacgacagcatggattcctacgatctcgacaacacgaccgctcagcttctgaacgcgttcgccgaatcgacggaagatccgtatctgcgctactacgacgagacgcgctaccaggcgttcatgaaggagaattcgaccaagtacggcggcatcggcgtgctgttctccgaatacaacggccttgcgtacgcggtcgatgtcttcgagggctcgacggcggatgcgaacggggtcaaacagggcgatttcgtggtcgctatcgacggcgaccgcagtcaggattggtcgatgacggaggtggtcaacgcgcttgcgcgcgacgagggcgattcggtcatcgtcacatggcgccgccctgcaagcatggatgcggaaggcggggaggagttttccaccacgctgaccacgggcatctacaaggagcagaacctgatcaccgagattcacgatcaggtcggctacatctcgctcaagcagttcacccaggagtcgacgggtcttgtcgagcaagccgtttccgatctcgaggaaggcggcgcgctttcattcgtgctcgatttgcggggcaatcccggcgggtaccttacgcaggcggtcgagatcgcctcgctgttcatgaagagcggcgtcgtcgtcgagatcgaaaccgtgcgcgacggcacgagcacgaaatccgtgacaagcagcgtgacggcaaccgacaaaccgctcgtcgtgctcgttgacggaaacacgtcggctgcggcggaggtgcttgcggctgcgctgcaagatagccagcgcgcgacggtcgtcggcacgaacaccatgggcaaaggatcggttcagagggttcagaagctcagcttcggcggagcgcttcgctatacggcggcttactaccgtacgccgcaaggccacgatatcaacaacgtgggcatcgcgcccgacatcacggtcaatgacgacggcgaagaaggagccgacagccagaaggattttgcgatagagaccgcccagtccctcgtggtgctttaggctgcgccatgggcagatcgcgctctacggcaaagcggaagacccggcgcaatccccgcagcaatccccgtggagtcctgcgcgtttcggctgccggttacgggttcgtgcaaacggccgaaggggagttcttcgttccctcttcgaaaatgggcggcgcattcgacggcgatatggtggagcttgctccttcgcacgtcaacccccagcacaaacagcctcacaaggggcgcagcgggaagaagggcgacaagccctcgggacgggtcattcgggttgtcgggcgggcgcatgagagcatcgtgggccgctacgaagtcgccgagcccttcggtgtcgtggtgcccgaagaccgccgcataccctacgatatcttcaccatgcgcaaggattatccccacgtgcaggatggcgacgccgtgcgcgtgcgcatcgccacctacccttcgcgcaccgaagccgccacgggcatcatcgaagaggtgatcggtcgggccgacgacgaggatcttgccatagatgtgatcatcgcgcggcataagctcgaaacggccttttcggatgcctcgctcgaacaggcgcgggatgcgcgggtcgatggggaggaggcgcttcgcgagggctaccgtgatctgcgcgatcggttcgtcttcacgatcgaccccgccgatgcacgcgatttcgacgacgccatctcgatcgagaaagtcgacggtttggttcggctcggcgtgcatattgccgacgtctcgcattacgtgccctggaactcctcgatcgacctcgacgcgcgccgccgcgcgacgagcgtgtacctcgtcgatcgcgtgatcccgatgctgcccgaagagctttcctccgacatctgctcgctcaaaccgggcgagccgcgccgcgttatgacggctgatctgtatctcgacgagaacttcgaggtcaaacgccgcattttctacccatcgctcatcgaatcgcacgctcgtctcacttacgaggaggcgcaggaggcgcttgacggaataccggttgcgtccgttgggaaggatcttgcggtgcggctcgcgagcctgcacgacgtcgcctgcggccttgcgaacaagcgccggcaggcgggcggcatcgatttcgatacgaccgaggcgaaggtgaagctcgatgctgacggcgctcctgtggacatcgtgctgcgccgtcggaccgatgcgacggagatgatcgaggaggcgatgatccttgcgaacagcgaggtggcctcctatttgcatgaacggggttttccgagtctgtaccgcgtgcacgagccgccttcccccgaaagccttgcagagctcgtgcccgtgctgcaggaattcgactatctgaagaccgtttcggcatcggcgttttcggcaggaaaccccaaggcgatccaagcggtgttgcagcgtgctgcgggaaggcccgaggccgagctcgtatcgatgctcgtactgcgttcgatgaagcgagccgaatacagaagcgagtgcgaacagcacttcggcctcgcaagcgacgcgtacacgcatttcacgagtccgatcaggcgatatcccgatctagtcgtgcaccgtatgctcaaggcgcacctgttcggcaagcctgaaaccttcgagcagcaggttcacaaccttacttggcttgcaaagcattcgtcggcaatggagcgtatcgccgaaacggcatctcgcgagtcgcaggaatacaagctggtcgaatacctgtcgcacgatgtgggagccgcgttcgacgctgtgatcgcaggcgttgcaagctatgggttcttcgtgcggctcgacaacacggccgagggtctcgttcccttgaaggagctcggcgacgagtatttcgccctcgatgcgaagcgccatcagctggtggggcaggaaagcggtgcggcgtatcggctcgggcagcgcattcgcgtggttctcgaagcggcgaatccgcgcgagcgcaagctcgatttcaggcttgccgcaaaagggcgctgaagccggcttcccgagcaccgtgcgacaaggccgtattccgatagggccatcgaaaccggtcccttgccgcagcgtcggtgctggtataatgccttgcaggcgtttgttgtcggagtcggcgggcgccgcttccggcgaatcgggatggcgttggcgtgcagcatggagcagcgcatcggcgccgagttcgccttcaacgggtgcagggcatccgaatattcgggcgggttgcgaagcgaaaggatgcgcgcatatgaagaggatcgtggcgattgcgggggctctggccctttgtcttgtgctcggtgcctgttcgggcggcgattcttccgataacgccggtggcggggaggttcccgaggctcaggcgaccatcgaatacgcggttgccgaaggggtggacgagtacgcacagggcgatctgcgcggcgcaagctatcgcgtttctgttccgtctcaggcgaccgaaggcgagctcgaaggggttttcgccgatgtcacggccgaagatgggttcgacgtgcataccgtatggttctacagcgatgcgcgcttggccgacgggagcgaggctttcgatgtggcaagcgccgttcaagatgcccccggcggcgaaccggtactggtcttggcgagcgaagaggcgaaggccgcaggccaaaaagcactcgccgcgaaagaagattcgtagatcgggatcgggtcgttttgcggagcgtcggctcgccgtgcgaatcgcatcgggttgctgggccgccgttcgggaggctcgctgcgcgcatggaaaaccatgactttgccagtcatccataaatccctgagtgaaatttgaagacgtgcaagctggaatgtgttttgggagaaattagtttgataatcaaactaattttgataccatgtcacggtcttgaaaccatgcggctgttttcggctgcattctgccggcgctctgccggttggaaacgagagaaggtttgcatatgagaatagccatcgtaaccgattcgacctgcgattggtcgcccgaagagtacgagcagaacaacgtcgtcatggttccgctcaagatccaggttggcggagaatcgttgcttgaccaggttgagcttccatccgaagagttttacgaccgcatggaggcggcggctgagatccccatgacctcgcagccttcgccaggcgatttcattgccgtgtacgaacggcttgcggaagaaggctacgatgccgtcgtttcgctgcatatcgcacccgtgctgtcgggaacgctttcgtctgccagcatggcggcagaccgcgtcgatatccccgttgcggcgatcgactccaagaacgcgacatcgagcctcggactgcttgtggagcgggcgtgccgtatgcgcgacgcgggatcttccttcgacgagatcgtttccgccgttgaagaagccgcagcgaaaacgcggctctaccttgcgcccgattcgaccgacaatctcgtgaagggcggccgcatcaccgaagagcaagcgcagggtgcggcgatgctcaacatcaagctcgtgttcgctttgaacgacgagggccgtcttgtgaatttcgacaaggttaaaggctcgaagggcatcatcaagcgcctggtcgaagttgcggcttcccatgccgaagagagcggagcgctcaggttgcggttcatgcacgcgcgcaacggcgcggaaatcgaaaagctcatcaaggcgcttgaagccgaggggatcgagttcgaggtttccggcatcgatgcatgcggcgctacggttgcgacccatgcgggcatcggtgtaatcggcatggccgtatcgccgctaaacgggtaaaatggtaccgaatcgaacggacgggagccatggccgagacaaacgaacaatccgaacagacacagcagccgctcggaagcgccgcgatcaggcgtcgtgcggagctcgacgagcttttgtcgagcacgttcaactcggtgctgaggaccgaagagaagtctctgcagaacaagctcaccgaaggtttgaccatcaccgaaatccatacgatagtggccgtgggcctgcatgaggccaaccctatgaacgtggtagccggacgccttggcgtaacgctcgccacgctcacgacggcggtgaacaagcttgtagagaagggcttcatctcgagaacgcggtgcgaagacgatcggcgcaaggtgcttatctcgctgaccaagcggggaaagcaggtgtaccgtgcgcatgggcttttccacaagaagatgatcaacgaagcgctggccgggctcaacgaggaagaggagcgcgtgttcgcccatgctctcgttcgcgtgaagtccttcttcgacgaacaggcttaaccgcaacgtctgcagaaatcatggaaccccttgcttgaacgaatgcgagtcgtagtattgttctcggtaaaaacttagattatcaaactattttgcgccaaggaaaaggagccgcccgcaaacgcggaagcggcaaagagaaaggaaccgttatggcaacgctggataccgtaaaagaagtgctctccgaaaacctcgacatcgagggcgagcaggttaccgaagaggcgacgctcgattcccttggaatcgattccctcgatatggtggagctcatctgcgatatcgaagagaagtgcgacatcgagttcggggagcccgagggcattgcgaccatcggtcagctcgttgagcacatcgactccctcaaataaggggaagcccatgaagacgcgggtaaccgagcttttgggaatcgagtatcccgtaatccagggagcgatggcatgggttgccaatgcaagccttgccggagcggtcagcgaagcgggtggccttggcatcatcgcagcgggagccgcccccctttcctggatcgaggagcaggtgcgccttgcacgcgctgcaaccgataagcccatcggcgtaaacgtcatgctcatgaaccccgatgcggcaaagatcgccaaactgctcgccgatttgcgcatcgacgtgatcacgacgggcgccggcagcccttcggcctacatcgagatgtggaaggaagccggatgcaaggtcgtacccgtcgttgcatcgagcgcccttgcggctcggatggagcgttgcggcgccgatgcggttgtcgcagagggctgcgaggcgggcggtcatatcggcgagctcaccaccatggcgcttgttcccgccgtgtgcgatgccgtttcgatccccgttatcgctgcgggtgggatcgcagatggtcgcggcatggctgcggcgttcgctctcggggcggaagccgtgcaagtgggaacgaggtttcttacggttgacgagtgcacgatctgcgatgcgtacaaagaacgcgtcgtggctgccaaggactccgataccatcgtgacgggtcgcgcgggcggtcatcccgtacgcgggctgaagaatgcgttctcgcgcaaggtgaggctgctcgagggcgatccttctgccgatgccgccgaacttgaggctctgtacgccggctcgctcaggcgagcggtggaaggcgataccgacggaggttcgatgatggcgggccaatctgcgggcatcgtccgcgagcggaagaccgcgcgcgaggcggttgccgatctggtacgcgaagcggaagagatcggcgggcgcacgcttgcggaaatggccgaatgcagcgccgagcgcgcacgggtgcgaaggggcgcgtagtggattttgccgtaaaccccgccgagccggttttcatgctctcggggcaaggatcgcaagctgtcggcatgggggcagacctgatgggcttgcccgaagtgcgggaaacgttcgattgcgcgtccgactcgttcgggttcgacgtcgcgcgagccgttgccgagggcacgcaggaggatctttcgcgaaccctgtgcgcccaggcttcgatagccgccctgtcggtgggcatcgcccgtgcgctcatggcaaagggcgttcagccgagcgccgtgctcggtttttcgctcgggcagatcggcgcattggcggtttcgggcatgctcgggatcggcgagacgtttgcgcttgcagcgcgtcgcgcagagctcatgagcgaagccgccgcatcccatccgggttccatgtgcgcgctgctcggcgccgacgaggaaacggttcggcagctgtgcgaggagtgcgccgaaggcgatgtgctcgtgattgcaaactgcaactgtcccggtcaaattgtcgtgtcgggcacaagcgatgcggtcggacgcgcgcgagaggcgtggggcgcccgcaagaagcgctcggcgatgctcgccacagagggcggctttcacagcccgttgatgcaagaggcctcggatgcgctttcgtcgtatctcgccaccgttccgttcgacgagccgcgcatccccctgatatgcaacgtagatgcccgccccctttgcgccgccgatgccgcagagcatctggctcgccatttggtcgagcccgttcggttcgatcgaagcgtctcgttcttggagcaagcgggtgcgaccgatttcgtcgaaaccggcttcgggggcgtgctcgtcggacttgtcaaacgcatcgacaaaagcctcgcccgatcgatcgtgcaggatcgaggcgacttcgaggcggcatgtgcccgctatgggatgggcgcgacggtgtcggacgcgctgcgtgaaagcgctgactctgaaaaggattgcaatgcaaacatatagcgaaggcgccgcatcggcggatgccggaatacgacgagctgcagtggtgacgggctcaagccgggggatcgggcgtgcgatcgcctgcgcgctcgcccggtcgggaatggacgtatgcgtgaatcatgcctcggagtcgagcgccggcgcagcgcaggacaccgctgcgtttttgcgcgatgcctacggggtgtccgcgatagccgtcaaggcaaacgtcgcatccgccgatgaggcgaaatgcctcgtcgatgccgcccaagaagcgttcggccgactcgacgtgcttgtgaacaacgcagggatcacgcgcgacggccttgccgcccgcatgaaggaagacgacttcgatgcagtgatctccgtaaatctcaaaggggcgttcaactgctgcaaagcagcgacgggctacatgatgaagcagcgctttggcaggatgatatgcatgggaagcgtcgtcggccttgccggaaaccccggccaggcgaactacgcggcatcgaaggccgggcttgtggggcttgcgaagtctcttgcaaaggagcttgcggggcgaaacatcacggcgaacgtcgtggcccccggattcatcgagaccgatatgaccgatgcgctttccgaaaagcagcaggccgcgattctcgatcgcattgcggcgaagcggttcggctcgcccgacgacgttgcctcgctggtcgcttttctggcaagcgagcaagcaggatacatcacgggacaggttatcggagttgacggaggtatgtccttatgaccattatcgatggcgcagatacgcgcaaacccgatgggagccatcgcgtcgttgttacgggtacgggagcgatctccccagctggcgttggagcgaaggcgctgtgggatgccgttatgggaaaacgatgctgcatcggccccatcacgcgattcgatagcgatcccttcgaggtgaagatcgccggggagatacccgactacgatccgatcgagctcggccttacgaagaaggaagcgcatcgccttgcccgattcgtgcagtatgcgatcatcgctgccgatgaggcgatgtccgaagcgggccttagcatggaatccgaagacgcgacgcgcatcggatgcgtgttcggatcgggcatcggcggactcgaggcgttcgagcaggcaagcgtcacgctcaacaccaaggggccgaagcgcgtcatccccctgttcatcccgacggttatctcgaacatggcggcgggtaccctttcgatccgcttcggcttcaaaggcgaatgcaccaacgtggtgaccgcatgcgcaaccggcacccattgcattggaacggcgtatcgcagcatcaagcacggctatcttgacgccgcgctggccggcggcgctgaagagagcgttaccccggtttccctggccggattcggaaacctcggcgcattgaccaagtcggccgatcctgcgcatgcatccatgccgttcgatattcgcaggagcgggttcgtcgctggcgaaggcgccggagcgatcgtactcgaatcgctcgagcatgcgcttgcccgcaacgcgaacgttctcgccgagatcacgggctacgggacgacgggggacgcctaccacatgacggcgccggagcccgacggagacggactcatgcgcgcgatgcgcatggctcttgacgagggcgggttcaagcccgaagacatcgggcatctgaatgcgcacggcacatcgacgcccgctaacgacaaggccgagtcgatcgcgctgagagggctttgcggcgagggctgcagcgttcctgtcgtgtcggtgaagggcgtgacaggccatatgctcggaggcgcgggagccgtcgaggccatcgtatgcgcacgctcggtttccgaaggcgttgtccaggctacgacgggttttgccgaggccgatcccgattgcccggtgcgcgtgctgaccgagccccttcgcgattatccgcaaaaggtcgctttgtcgaactcgcttggattcggcgggcataacggcgttctcgcgatttcgccgtaccgcggctaggccgaatccgaaaaggaaaggaaaactcgcaatggacgatatctcttatccgtgcggcaaggccgtcatcgaatcggtgctgcctcatcgcgatccattcgtctgggtgtcgcgcgttttgtcgtgctccccgggtgaatcgattacagccgagctcgaagtgaccgaggacctgcctcttttcaaagggcattttcccaaccaccccgttttgccgggcgttatcatcatggaagcgctcgctcaagccgcatcgttttgcgtgctggttgagcggggggccgaggggtcggtcgggtttttgacgggaatcgacaaggcgaagttccgccgtcaggtgcttcccggcgacaccgtccgccttgacgcgcgcatcgtcaaatcatcgtcgcgcatgtgcgttgcggaagtcgaggcgagcgtgggcggtgcgctctgcgcgagcgccacgcagaaatatgtgctcgatacggcgccgagtgcggcgtaaaaaggagtaaaccgtgggaagacggaaacgtcaggactacattacgatccctcatcagggaaccaagcccgaatgggttcaaggcgtttcgaccgaagagctgcttgccgccaacggcacgaacgtcggagcgctcggttcggttgagatcgcgtacagcctggaaaccattgcgcgcgaactcgatggaaggtgcgcgaagggcgccgccgaaggcatcgcaaagccccgcgtgctcgttgcgggctacggcgaagatgcgaagcgaacgattcgcgcctgttcggatgcgggtatcgatgcgtacgcgatctacgccgagtgcgatcgccaggcggcatacgtgcgcattgccgcaggggccgttaaggtatccgaggagttttccgaagcggtattctcgaacagctacgcgcttctgaccgcatgcgaatcgtgcggggcccaggcggtgcttgcccttgacgaggatcttggctgcgaccgccatttttgcgggctgtccgaggcgaaaggcgtgaaggtgtttcgcgccatcgcttcgtcgactccccagagcggctggctcgtttgccaaggtacccccgtcgttcacgaggcggcatggcgcaagtgcccgagctgcgggctcatgttcgatgtggcaacgcttgctgcaggccacttccggtgccccggttgcggcggcatgtaccgcatgtcctcgtccgagcgcatctgcgatctgctcgatgcgggcagcttcgtggagtgggaccgcggtttgccgcaggctgacccgctcgggtttcccggatatctcgataagatcgagacgacgtgcgaagagacggggcttgacgaagcggttcgatgcggcgcgggaaccatcgcgggcatgcgctttgcgctcgcgatcatggactcgcggttcttcatgggctcgatgggatcggtcgtgggagagaagatcgcccgagcggtcgagcgcgcaaccgaagagcacctgccgctcgtcatctttaccgcatcgggcggagcccgcatgcaggagggtttggtttccctcatgcagatggcgaaggtatcgtgtgctctttccgcccatgcgcaagcgggccttctgtacgtatcggtgcttaccgatccgacaacgggcggtgtgaccgcgtcgtttgccatgcaaggcgacatcatactggcggaaccgcatgctctcatagggttcgcgggccagcgcgttatccgcgacacgatcaagcaggagttgcccgaagggttccagagcgccgaattcgccttggaacacggccttatcgacgcgatagtgccacgcgaggagctgcgcgagaagctcgcccatatcatggcaatccatgaagcgacttcgaagcattgcatgctcgaagacggcgtatcgctgagctatgcggcggtcagcgagaacctatcgggggagggcggtacgtacaacactgtcacgtacggcatgttccctcagctcaagcgggctttttccgttgcatcgcagcggttcatgacgacgaagccgaagcaggcgcgtccgtcgctgttcggcaaatcgaagaagcagcgcgcttccgaaagacgtttggaagctcttttgaggggcgggttctacgccgaagacggcatattgctcgacgacgaggccgacggttcctccgaatcggatgagaagcgcggtgtcggcctggccgaccgggcgcggaaacgcggcgatgcggcgcgcgtcggcgcgtccaacgatgcttgggaaagcgtgcagcttgctcgcaataccaggcggccgaccgccatggcctacgttcgggaattcgtcgacgggttcatagagctgcacggcgatcgttcgtttgccgatgacggggcgatcgtggcgggcatcggctggataggctctcatccggtaacggtgatcgtgcaggagaaaggagccgatctcaaggagcggcttgcgcgcaatttcggatgccctcagcccgaggggtaccgcaaaagcctgcgcctgatgaagcaggcggagaaattcggccgaccggtcgtgtgcatcgtcgatacgcaaggggcgttttgcggaaccgaagccgagcagcgcggcgccggcaacgccattgccgacaacctgatcgcgatggcgggactgcgcgttcccatcgtgagcgtgctcgtcggcgaaggcggcagcggaggcgcgctcgcgcttgcgctcgccgaccgggtggccatgcaggagcatgcggtgtactcggtgctctctcccgagggctttgcctcgatcctgtggaaggaccgatcgcgagctcccgaggcggctgccgtcatgaagatgagcgcccgcgaggtctacgatatgggcatcgttgacgacgtgcttccggaaggcgagggtccggcgcacgaaaaccccgaggttgccgccgctttcgtgcgcggctacgtcgttcgagcgctcgaagagctcgatggagtgcccgtctcccagatgctcgaagagcgatacgcgcgctttcgcaggctgtaggttcccgcaacgccgttcggcggagcttggcgcgccgagcagtcggattgctccaagcgcttcggcggctgcgcgaagcggggtgctgcgatgcgcgaagctcgattgatcgtcgcggtcgtatatgaccaagacgcatcgtgaaacccatcggttaagggtacaatggaccgatgggttttcgcatctcttcgaagagggagttgggccgggaatgttcgacaggatcgatgcgtggtttgcacgcttggaagacgtcatggcgtttcaggccatacggcaggggctcattctgacgatcccggtgctgctcgtcggatcgttctgcctcgttttcctgaacgtgccgatcgagccctatcgagagttcctcgatgctacgccgtggctgcagggcatgctcaacacggcgtacgcggcaaccatgggaatcttctccctttacgtctcggtagcggtatctttgaggtatgcggattcgtacgccgataagcacgggtcgttcttcacgcagggagccccgtttgccgctcttgccacgtatctcatgttcgtcggcttcggtggggaggggttcgatcagacggtgctgagcacgcgctctctgttcatagccatcgtgtgcgggctgctctcttcgatgctgtattgccggctggttcgcttcgggaagaaaaagcgcctgcggggagatagcatcgatggcgtttttaaccaggcggtggcgggtctcgtccccatcgcgacggtgatcgcggtcttcgccgttgcggcaacagcgctcacgcggtgcttcggtgccgatagcgtcgaggagttgttcttccttggaatcagcgcgctttttcctctggcggagcccacttgtgcaagcggccttctctatctgctcatgaacaacgtcatgtggttcttcggcattcacggcggcaatatgctcgatggcgtcgcccagagcatcttcgtgccggggaccgccgcgaacgccgctgcgatggcagctggggccgaaccggtgcaaatcgtgaccaagaccttcttcgacgtgttcgcttcaatcggcggtgccggggcgctgctctcgctgctcgcagccatccttctgttcgggaaaaggcgcaacgttcggcggctctcggcgtttgcaaccgtgcccatggtgttcaatatcagcgagataatgatgttcgggttgccggttgtgtggaaccccgcgctgttcatccctttcatcatcgttccgttggtaaacatgatcatcgcttacggagctatggccatcgggatcgtgccgccgactatcgtcgacgtttcgtggacgaccccgccgatcgtcggcgggtatgtggcgacggggtctgtcgcgggggctgcattgcagctggtgaatctcatcgtcggtgcagtcatctaccttccgttcctgcgtcgttacgagcggcttgccaacgagcgcgactgcatcgagtaccgaagcctgttgaagctgtttgaagatgccgagaaggcgcagcgcgaagtgaatctcactgcggctccgggagccctgggggctgtagcccgctctcttgccgaagacatacgccttgcagtcgaggatcgaacgcttcgcctgcactatcagcctcagttcgacgtagacggccgaccgatcggcgccgaagcgctgcttcgcttcgagcacccggtgtacggtgcgatttaccccccgcttgtcatagagcttgcacaggaggcgggattgctccctgatctcgaacgggctgtgttcgatcgggcgctcgacgatgccgctgtcgtcgaatcgcgtgcggcgaagcaggcgatgcccgctggtttttcgataagcgtgaacgcgacggctcgcatgttgcaagacgaagcgtccgtcgacttcctcattgcggcggtgcgggcgcgcgggctgagtgcgggccgcgttgtcgtcgaagcgacggagcgtgaggctctcagatgggatgagggggcgtctgatctgctcaagcgcatcgccgatgcgggaatcccgcttgccatcgatgatttttcgatgggacgaacctcgtttcagtatctggaaacgagcgtcttttcgatcgtgaagctcgatgggacgattgcgaaaggcgtgatggaaaaccaacggtacgccgagatcgtgtcttcgatcacgcgcttgtcggagcagctcggctttaccgtcctcgcggaatacgtcgagaccgaggagcagcgcgatcgcctcgtggcgctcggttgctcgtattttcagggatacctgtatgcgcccgcgctgccgttcgaggcgatggcggagcgggtgagcgaaatgtctgcttcacggtagcgtccggcggcttcttttcggtcacgctgtgctagtatcggtgttgtcgagaggaggctggaatgggacaggggcaaagggacgttcgaagctgcgcaaactgtgcggtctcggcatgcgaccccgatggcgcagagaggccgtttccggagttctgcatgacgacgcgcacttccgatgaaacgtttgccgaagctgcatcgctgtaccgcgacgatcctgaaacgatgcgcatctttcgggcggctgcggaggtcgagggcctctactacggaaggttgacgcgcgtcgaggaggtcatagtgttcgcccgccgcatcggggctcgcaggataggggttgccacctgcacggggctgctcgacgagacgcaggcgttcgcgaagattcttcgagcgaaggggttcgacgatgtgtgcgccgtgacgtgcaaggtcggaaggatggacaaggaaaaggcgggtattccaaacgatgcgaaggtgcatcccggttgcttcgagccaacctgcaatccgatcgtccaggcgcgcatcctcaacgaggcgggtaccgatttgaacgtcatcgtcggcctttgcgtggggcatgatacgctgttcatcaagcactccgaagcgccggttacctatctggtggtgaaggatcgcgttttggcgcacaatcctgcggctgcattgtatacgaggggatcgtattacggaaggctcatggaatccgatttacccgagccgcgaacggattcgggagctggatccgattgatcgccggaggcagccgatgacggggcgtcactacatgtacgtgctcgaatgcgcggatggaaccctgtataccgggtatgccgtcgatgtggaacggcgcgttgcggcccataatgcgggcaggggagcgaagtacacccgatcgcggttgccggttacgctcgtcgcgaacgcggagttcgcatcgaagcacgacgcgatgagtgcggagtatcgtttcaagcgattgacgcgcgaagagaagatccggctgctgtccgacgattgcgcaagctcgctcgagcagcgattgcgcgagctttccctttcgtgacgcttcttgttgaaagccggcgcgccgcttttcgaaaacgattttgcgcccgggctctggctgtctgcgctttcgaattttcccagatcgaacagggaaaagaacgcctctcgtgctatatacgcaagaaagaataatttaattgattgagtgacatagttgactatgatactatgaaaccaatgattcggccgaatctgctcagggggttgagctatgggttcgaggtgctttttgcccggattgtggctcgtctccacaaattatttcaaggagtgtgaggaggaggcatggagcatggtctgacaaggcgcaaatttcttggcgccgctgcagctttgggggcgttggcgctatcgaccggatgcgcaccgaaggcaatggaggagcaagaagaaggacaagctcaatcagaggttgtcgatattgactctttggaagtcaagcattcgtggtgctatatgtgcggtcccgccaagacgttttgcgccacgaggaactacatgaaggacggcaaatgggttcatgttgaaggaaatccggaggccggcaataattggggctacggcagcaagacactctgcgctaaaggtaacgctgcgatgcagacgctttacaatcccgctcgtcttgagtatccgatgaagcgaaccggcgaaaagggcgaagggaagtttgagcgctgttcatgggaggaggccttaggggcgatagcatcgaaattgcttgagaaccgtgagaaatacggtccagaatcgtatgctgcgctctcgcctcaggaatgcaaattcgttggtcaaatgggcagacggtttttgaatgtatacggtagtccgaactatctgcacagtgcaatctgcgtgatgcagatcatgtcgagccagcacgtttcgatcggtaaagcgacgacgactactccgcttcaaatggacaagacgaagctcttggtcagttggggtgttaacggtgagaattccgcggtgaacaatattatggatgctcgtcccgtagaacggcttgacgcaatggagaacggcttggaattcatcgatatccggccaatgctcgatcctctcgcatcgcatgctgccgaatgggttccgattcgtccggggaccgatttggcgttggctctcgccgtgctaaacgttttggtaaccgaggatctgtacgatcatgatttttgcgagaattggtgcaatgggtttgaagagtttgccgagcatgtaaagcaatttcctccttcgtgggcttctcccattacgggtatttctgaagagcaaattgagaagatcgcccgaatgatgggcactacgaagcccatgggcattcagtatggaaacggtgctggggatcaagcgaatgatggaagttggctgtgcatctgcataaaccttattgaggctattacgggtaacttggatgttcctggtgggggcggagccccccttcttgtgggcccgcctctgatcgatatcgagtcgttgaactggattccgactcttcccgagaagctgcctgtttatgaagaggacaccgaaaatggatgggctccaagtaggtcgagattggttgcgcccgagtttcctcggtggtatcaagatcctgaaacatggtcttcgctcggcttgttcagggagccctcgtctgcaacgtaccgtgcgctcatgagcgtcttgaccgaggaaccctatcccttgaaaagcgtgttcgcgcatgctaccaatccgctttctcaaactcggcagccgcagaaaattgccgaagccctcaagaagcttgatttctatttcgtgatggatacgttctggaacccctcatgcgattacgccgactacgttcttcccgcgtgcacaaggttcgaagacagctgccagatcgatgggcgcaatatgcccgaaggcaccttcatcggaatcgaacagaagcttgcggaaccgttaggggaatcaaggtcggactggcgcttctactgtgatcttgcggttgaaatgggattcggcgaggatttctggaatggcgattttgaccaggcattgcgagagcagcttgagccgacagggatcagccttgaggagctgcgcgaaaaaggctatgttttcgtggagcgcaccgatggcgcgacgcccaccgagccgtcatatcagaactacgatcagatcttcagcatgcttccaaatgggaaagtccaatgctacaacgagattcttgggggaaaaccgaacaatcgcgatgatggcgaattggggtatctgcccgaataccaaggcccgcccgagggtttagcggaaacgccggatttggcagcggaatacccgctgatcttctccgatgtgcatgcgcatcgcatgagcgtccacagctatttctccaatttgccctatatgcgagaacggaaccgtaaaccatgggcgaagatcaatccagccactgcgaagaaatacggcatcgaggatggcgagtggatgaagatcgagtctccgcacggatggatcaagatggttgcggagtacttcgagggagtatcccccgaagtgatcatgggtaaacgcggttggtggcaggattgtcaagagctcgatgagcctggatatggatgccttgacggtggcagcgaggtcaacgccctttatgatgcgacaatgactaacttcgatccattccattccgcgatggccaagcagactttggttaagatcagcaagtgggaggggtagacgatggctgaacaatacggattcttcgtcgatacgacacgttgcatcaagtgctatgcctgcgaagtcgcctgccagcaatggcatgggatcaaagccggcaccgtccaccgcagggaggttcaggaggagtgcatgggaacgtttcctgatgtgaagcgtacgttcatgtctctttcgtgcatgcactgcgaaagccctctttgtgctgcctcctgcccgcagggagcgatcgccaaacgggaggaagacggtctcgtggttgtcgacaaggccaaatgcacgggagacaaatcgtgcgcgaccgcgtgtcccttcgacgttcccgagttcatcgaactcgagggcggcggagtcgtcatggacaagtgcgatggctgtttgtcgcttagccgcgaggtcgatgaggcgccccgttgcgtgaacacctgtccggccaaggccctgcacttcggcaaactggaagacatggcggcgcttgccgcaaagaagggcggaagccggctcgaaggaagcaccgttccttccgtgtacgttgcctacgcataggctgttttgcgcgaggttgagaaacctgcgtgtgttttagccatcgggctgcgatatcatgtatgcaacgaacatcgtttgctcgaaaccgctcgacggcggctcagggggttagacgaggtgccgtcgaagcggttcgatggatgcggggcgggattattgtgagccagtacgggtttttcgtcgattcgacacgatgcataaaatgctacgcctgcgaggtttcctgccagcaatggcacgggatgaaggcgggtaccttcatgcgccgaacggtgcacgaggaatgcacgggcgtgttcccccgagtgaagcggttgttcacgtcgctttcgtgcatgcattgcgagcagcccgcctgcgtaggcgtttgcccggtcggtgctttgtcgaaacgcaacgaggacggtttggtggtcgtcgacaagcggaaatgcatcggatgccgcagctgtgcgctggcgtgccccttcgacgttccgcgttatggagacaagaaggtcatggacaagtgcgatgcgtgcttgagcctggggagaaagcgagacgaggcaccccgttgcgtgaatacctgccccacgaaggctttgcatttcggaagcatcgagagcatggaagcgcttgccgttaagaaaggcggcaggcggatggaaggctatacggttccgtcggtattcgtcgcgtccgccgaaacccgatcggagaatcaatgaacgaggagaacgattatgcgatatgcaatgcaggagagcgccgagcttcttgacgatacggccatgcggaaagcggttttcgaatttttgtcggcggcgtatctcaacgagatgagcggggaattcctcgaaggcctcaagcgcgatccgatcgagttcgaaggcgagctcggggcgttcatcgattcgctggctgtagccgatctggaagccgtgcgggttgatctggcttccgaatacgcaaggatattcctcggtatgagcccgtcgccggtcgctccgtacgaatcggtatacatgagcgatctgcatattctcatgcaggagccgcgtgacgaggtgcttgggtgctaccgggaagagggcgtctctgcggcgaaggatctgaggctccccgaagatcatatcgctttcgagttcgcgttcatggcgcacatgtgccagaaggcgatcgacgctttgcgctctggcgacgaacgcgaagtgcggcgttgcttggcaaagcagcaggagtttttaagcaatcatcttcttgcgtgggcgcccgatctttgcgccgacgtgctaaagcgggcccatacgccgttctatcggggcgttgcgcagttgacgcaggattttctcgagtccgaccgctcctatcttttagagcttgccgtttagcggctcgtggagtcgcgccgtggtcaattcgttcatcgcatggtatctctttctcgccgggatgggaggcggtgcgtttcttatcggcgccgtcgtcgatatcgctttgaggttttccgatagcgagcgtttggcgagaataggcgcagtgaccgacgggggcctcatactgggtccggcggtcgttgttttgggtgcggtttttctactggctgatctggggtccccggagagggcgtttcaggtgtttttcacgccttcggcgagcctgctgacgatcggttcgtgggcgattgcggtgttttgcgcatgttcggttgcggcgttgttggtggggggcatggttgaaaccacggtttcgagagtggcggaggctgttttgcacggacttgccacgctggcagcttgttgcgtcatcctgtactccggcatatacctttcgacgtttccgacggttccgtttctccatactcccgtcgtccctgttctgttcgttgcgtctgcgctttctaccggcatggcgttgctgatgatcttcgggttcgtcattcgggatcacgaggacgttctcgagggcatggcggattgcgcgcggatggatcttgcgctgatagccgtcgaagtggtttcgctctgtgcgtttctgtggctgtccttcggctcttcttcccaggcggccgattccgcccatgcgctcttgttcggcgagcaggctggtttgctctggcttggcgttgttgcggttggcatggccgctcctgtggcgctcgaggcggcgcaccttcggggggtcgacccgttcgtgcttgcgatcggggctggatgcgtatcggttggaggcctttgcctgcggtacgccttgttgcttgtagccgtaaggtacagcgccgtagatatgagtgcggttgctttttggggatgatgagagatgacatgatgccagttcgtttaatgatactatggtgtttatgattgatgaggcgatcgatagggaagtcgcaagcgatgcgatggggacgttccaggtggacgagcgcagcgtcgtgcccatctggattcagattcgcaagagaatcgtgtacctcattacatcggggaagtataaaactgacgaacggttgccttcagtgcgcgatctgtccgttcgtctcggcgtcaactacaacaccatcaacaaggtgtaccaggatcttgagcgagacggctttatcttcacgaagcggggaaaggggacgttcgtctctgatgttgcttcgattgagtactgccccgatgacggggagatggaagcacttgcagccgatttcgttgagaacgccctcggcaagggaatggagcctgaagatatcatcgatctcgtgagaagcgaaatcgttaagcttgaaggtccgaaagggatctgattcagaagcagtacccgtgcaactcaggaggggtgagctatgcgcaataggaacggaaggcgagaagacgggatgggggcctcccgaagctctgcaatgaaaggcagtgcgccgaaggggaagaagacttcgcgcaacggggtgtatttgttctcgctgaccattttcttaatcgggcttgcggcggtcctcgttgcgttctgggggaatttgtcggtgccagccatcattgtggccatcgtcgtggggttcatcttggcgtcgagcattcgcatcgctccgcagtgggaacgagtcgtggtgctgcgactcgggaagttcaaccgcatcgcgggccccggactctatctgctcattccgatcgtggagcatgccgccgcccatgtcgaccagcgaatcatcaccaccccgttcacagcggaagaggcgcttactgccgacctcgttccacttgacatcgatgcggtgctgttttggctggtctggaatcccaaagacgcctgcgtcgaggtcgaggattactcctcggccatttggtgggccgcgcaaaccgccctgcgcgatgcgatcgggcgcatcaaccttgccgaggtggcgacacggcgcgagcagctcgacaacgaaatcaaggaaatcctcgatgcgaaaacacgcacgtggggcattacggtggtatcggttgagatcagggatatcgccatcccgaaggagcttcaggacgccatgtcgaaggaggctcaggccgagcgggagcgcaatgcgcgccttttgttggccgagatagaaaaagacatctcagagatgttcgtcgaagctgccgccgtgtacgatcaaaatgataaggcgatgcagctgagaaccatgaatctgatctacgagagcgtgaaggagaagggcggtctcgtgattgcgccgagcgcgttcggggaggctttcaataacatagaggggttcgtaaagcagccgaaggcttgacgggcggcgatcctgctgtctgcgtcgcgctggctaggattccatctgcccgcgtatcagccggtcgaggttggctgcgaacatcgcgcgatcgtcttcggtgaacgtcgccggtccttttgtcctgcctccctgtcggcgcactttcttttcttggtggcgaatttccatatccatatcgatggttgcaagcgaaaagacccttccgcggacgccgatggctttcgcttttcggccgaggaccatggcggcaaggccgatatcctgcgtgaccacgatgtcgcctggcgaaagttcttcgacgattgcgaaatcggcggaatcggaaccgacggcgacgggcagcgtatcgacccagaacccgccggtttcctcacgcgggtcggcgcggcgaatgtggcgagcgaggttctgcgtcgagtttcccgcaataaccgcacgcagcgaatgcttgcgggcggcggcgatcgcctccgcggttaccgggcaggcgtcggcgtcgacgaagatggtcgggcgcgtcgtgctatggtcttcgcttcgggacatgggattcctttctcgatcctgtcttattgtacccgacctgtaacttgcgtcctgcggggttcatgatcgagaataggtcgtgaccgatgaacgcgagggaagtggcgcaaatgaatcatctgaatctgcgcagcgaagccgaagcgcttcgcgaagacatcgttgctgaccgccgctggctccacgagtacccggagctgggattcgatctgcccgaaacgacggcttacgttgcgaagcgactgcgcgacatggggtacgaacccgaagagatcgttccgagcggattggtcgccctcgtcggcgatacatccggcccgtgttttctgttgcgcgccgatatggacgcgcttcccctcaaggaagaggccgatgttcctttcgctgcaaccaacggcaggatgcatgcgtgcgggcacgacgcccatgctgcaatgcttttgggagccgcgcagatgctgaagaatcacgaggcggatcttggcggctgcgtgaagctcgtcttccagcccgatgaggaaggcactgctcccgacgagacgacgggaagcggcgcgatggtagcggcaggcgttttggaaaatcccgcagtgggagccgctgccgccctccatctgatgacggtcgactatgcccggggtcgggtttacacgcggctcggcacggcgttttcgtcggttgacgatatcgacatccagatcatcggaaaaggctgccatggatcgcagcctcagcacggcatagaccccatcaacatcgccgcccatgtgttccttgcgttggagaacctcgttgcgcgagagaccgatccgaccgagcagtgcgttttgacgttcggttcgattcacggaggcgctgctgcgaacgtcattcccgacgccgtttgcatgctgggcacgctgcgcacggtatcggagagcacgcgatcccgcatgaaagagcgcatatccgagctgtgcgaaagcatggcggagggattcgggggaagggcgacggtgcggtttctccgcggagttccgagcgtatgcaacgatcccgctctgaccgaagaactgatcggctacgtagaggaggagggtgttgccgaggtcagtctgctcgaaaaaccgattgccggctccgacgacatgagcgtgatatcgcacgaggttcccacatgttacttcgtgctgggatccggttcggccgaggagggtttcgcgcatccggtccatagcccccgtatcgtgttcgacgaaagcgtgctttcgcagggcgccgcccttgcggcgactgcagccatgcgatggcttgccgcccgcacgtagcggcggttttgggattgccgcgggctgttgcagtcggatcctttgcgggtttcggtttcggcatccttatcgaagagagtgcctcgcggtcttgacaatctttttcgtgctactaaaatctcttgttggcactcgaacattgagactgctaaaaatgccgctcatagttgtgaatagtatccgtaaggaaggtaatcggtatgcgcaagttcaagactgagagcaagaagctgctcgacctcatgatcaattcgatctacacgaacaaggagatattccttcgcgagctcatttcgaacgcatcggatgcggtcgataagctctacttcaggagcctgaccgattcggagatcaagatctccaaggatgatctggctattctcgtttcgttcgacaaggcggcccgcacgatcaccgtctccgacaacggcatcggcatgaccaaagacgagctcgatcgcaatctcggtacgatcgcccattccgacagccttgagttcaaatcggaaaactccgaaacccagggcgaggacatcgatatcatcggccagttcggcgtgggcttctactcgggtttcatggtggctagcaaggtcaaggtcatttcgcgcgcctacggttccgacgaggcgtattcgtgggagagcgatggcgtcgaaggctacaccatcaaggaagccgagcgtgaaagccacggcaccgatgtggttctcgtgctcaaagaggataccgacgaggaaaactacgatggctacctgagcgaatacaaactcaagagcctcatcaaacgctacagcaactatgtgcgctatcccgtgcagatggaggtggagaaaacccgcgaactgcccaagcccgaggatgcgggagatgattacaagcccgaatacgagcattacgaggagcttgaaaccatcaactcgatgattcccatctggaagcgcccgaaatcggaagtcagccaggaagaatacaacgagttctacaaatcggatttccatgatttctccgatccggttcgcacggtctcgatccatgcagaaggctcgttctcctatgatgcgctgctgttcgttccaggacgcgtgccgttcgatctgtacagcaaagattacaaaaagggccttgccctctacagctcgaacgtgctcatcatggaaaaatgcgaagagctcgttcccgactacttcaacttcgtgcgcggcgtggtggacagtcaggatcttacgctcaacatctcgcgcgagacgctgcagcacaacagccagctgcgcgccatcgcgaagcgcatcgagaagaagatcaagtccgatcttgccgatatgcgcgacaccgatcgcgagggatacgagaagttcttcgagaatttcggacgcggcatcaagtacggcatctattcgagttacggcatgaagaaagacgagcttgccgatctgctgctgttctactccgcgaaacaggagaagatgattacgctcgacgaatacgcgaagctcatgggcgaggggcaggaagcgatcttctatgcggcgggcgattcgattgaccgtctggcgaagatgcccatcgtctcaaccgttctgggtaagggctacgacgtgctcttgtgcaccgaagacgtcgacgagttctgcatgaccgcaatggccgattttgccgtgcccgacgacgatgatcctgattctctgacggcgtatccgcttaagaacgtagcgggcggcaatctcggtcttgagaccgaagaggaaaaggaggccgcagaggctgtcgagaaggaaaacgagagcctcttcgatgcgatgaaggaggcgctcggcgacaaggtgacgaaagtggccgtgtccacgcgcctgagcgattctccggttgcgctgacggccgagggtccgatctccctcgaaatggagcgcgtgctgtcgtcgtcgcccggggccgatgacgtcaaatcggaacgcgtgctcgaggtcaacgccgagcatccgatcttcgaaacgctcaaggcggctcaggatgcaggcgatggcgacaaggtgaagctttacaccgacatcctgtacaatcaggcgctgctcgtcgagggcatgccgatcgacgatccggttgaatacgcccaggcggttgccaaactcatggtgtagcgaccttatctcatccgttacggaatgcgcccgcgcgacctgtccgcgcgggcgcatttgcgtagcagccctcggttgggctcgggtatcggctttgccaagcgggttcacgttgcgggcgattcgtcggcgcgtgccgagcggctatggggtactatgaaaagctgcgatttcgatactccgtttgaggaagtgacccctgtgcccgatgcgccccgtatatccgcgaacctttcgagcgtccctgatctgatcgaggcgaccatcgacgatcgtgccgccgaacgccccgtatactcgctggtcgtcgaagggcagacatgcgagggcgtcgatctgtcgcggctcgagcttttttcttcgcacctgctccgctgtgcgtttctcgcttccgatctatcgaatgccaccttcgaagacgttgcgttcgagcagtgcgatttttcgaatgcggacatctcgtcggcgtatttcctgcgctgctcgttttcctcgtgccgcttcgtcggtgccgacttctccgaaacggtgttcaagcatgcaacggtgacggattcgacgttccagtacgcgagtttcacgcgagggggcttcgatgcctgcagtttcgaggggtgcgacttctcccaagcctcgatagcggaagccgaactgaagcgcgttgagttctcgcaatcgcggctgacgaacgtcgacttcttcaagacgagcttgcgcggggtcgatctgtccgacaacgatatcgcgggattccttgtgtccgataccatgcgcgagctttccggatgcatcatggacccctaccaggcggcatcggtggcacgtaagctcggtatcgtggtgaaggagtaggccgcgcaaggcgggctgtgcgcggctttccttgccgcacgtttatgtgcgcaaggcaacgcttgcctgcctgctcggcaaacgccgttgggggaactgtcgcgaaacggtataatgtgcccgaaacgcataagcgcccgtttccagctggtcgcctgcgcggattgcgcgcagcgtccgtggggatcgcatgtataaggagtatctgatatgaagaagaaagatgtgaggtttctcaagcgcatgcttgagaccccctcgccgaccggctcggaagaggccgttgccgccatcgtgcgcgaacgccttgccgattcggccgacgagatcgagacgaatgtgctcgggtcggttcacgcgacgctgagggggaccggcgaaggtccgtccgtcatgctcgccgcccatatggatgaagtcggcctcatggtcacctatatcagcgacgagggttatttgagcgtggctgccatcggcggcgtcgatgcggcgattcttcccggcatgcgcgtggacgtgcatgccgaaggcgaaacgctgcgaggcgttgtggggcgcaagcccatccacctcatcacgcccgacgatcgcaagaacgttacacctctcgacaaactggtcatcgatctcggtcttcctgcgaaagccgtgaagaaacgcgtgcgcgtgggcgattcgatcacctacggcgtcggtttcgagcgtttcggcaagggcatggccgtttcgcgggccttcgacgacaaggccggcgtgtgggttgccgcgcgcgtactcgaagagcttgcgaaagcgggccgtgcgagcggtgatttcgtggcggcggcaaccgtgcaggaggagatcggcgtgcgtgggggagagacctccgcttacggtgtgcaccccgatgtcggtctggcgttcgatgtcactcatgcaaccgattatccaggcatcgacaaggcgaaacacggaaacatcgcatgtggccagggtcccgtcatcgcgcgcgggcccaacatcaaccccatcgtattcgaccggttggtcgccgcagccgaagccgagggcataccgtaccagatcgaagccgaacccggcgttacgggcaccgacgcccgcgccatccagatatcgcggggcggaaaagcgacggggctgatttcggttgctctgcgctatatgcatacgcccaccgaggtcatctcgctttccgatcttgaggcgaccgtgaagctcatcgtgcgattcgtgctcgatctcgacgaatccgtttcgttcgtgccgggtatggcgggtgcgatcggttcggtcgagtccgaagatgcgggtaccgtagatgagcagggaagcggaacggaatctgccgaatgaagcatgaggagaagataatcgccaagaacaagcgggcgttccacgagtacgaagtgctcgatcgcttcgaggcgggcatcgaactcaaaggtacggaggtgcgctcgctgcgcgacaacaactgtcagctcaccgatgcgttcgttactatccgaaacggcgaggcgtggcttcataacctgcacatcgcgcccttcgtcaacggcaacatcaacaacgtcgactctgatcgcaagcgcaagctcctgctccacaaaaaggagatcaggcaactgcaggaagcggtcaaagagaagggcatggcaatcgtgcccctcaagatgtactttgcgaaaaacgcgctcgtgaaagttgagattgccattgcgcgcggcaagaagcttttcgacaagcgggcaagcatggcggcgcgagattcgcgtcgcgaaatcgagcgtgcgctcaaagaacgcagccggtagaccgagcgtcgcgttgtgcgacaagaataggagcagcaatgaatttggacgaagagctcgaggtgctggaagacggcgtggaaacggaaggcatcgctgccgaagacgagtccgaccttgaaatagaagacgaattcgaggacgccgccttgggcgtcgatgccgatgaggagaccctcgaagaagtgtataaggatttcgagaacgacgaagccgacatcgatggcgcgggtgctccgaacaccggcttcgagatcgttgacctcgaagagttcgaaggggaagccgaggaagacgacgaggagtacatcgaagtcgaacttgaaatcgatgaagatgacatcgagagctatctgctcgacgaagacggcaacgaaataggattcaccctgctcgatgaagacggtaacgaagtcgaatacttctacgtcgaagacgaggaagccgaggaagacgatgaaaacgaattcgatctcggcatcacgaaggaaggcgtcgcccaggccacgagcgacatcaactccatctacaaggacggcgttgcggtggcggcagagctcaaaggggcgttcgacgatatcaaatcggccttcgatttcaagagcgtcttgaagaagtagcgaacgagtgctaggatagaacgtcctcgcaggcaccggctggctacagcaccctgcggatgcactttgaaaaggtggggccatcgacccatgcagcatcgctgcagttcggccgcttgggcggcgcatacttttgggggcgactggtttcgacatggtaagtttgaaatgaggagcaagtcgtggtctcctcgccacgttaaacaggggtacagtcaatttaattggcaaaaccaaaactcagagcgctccggcgctcgccatggctgcttaatagcgcctggctgtcggccttggggtttccccgaccctcggttcggcatcatctaaggggaacgctcttggacacgtggtcggtatggtccaagctaagatcgaaccggctaggaaccgtttagtccgtcaacgagcagagcggctccgaatccttttcgttgactaagcttgtagggcctcatggatgatttagtatggaccggagttcgatcctccgcgcctccaccaacaatgcaggcctcccgatctggcagaatctcagatcgggaggcttttctttctcttgcataccgtttatcgagcacctctttgccaatgccggatcgatcatcggaacagccgcgttcgcttttcgcggtctgaagaggtgtggcacgatcttttggcggtgcttgaaggttttggccaaaatgcgcgtcgaagcgcaggttggttcggcgacacgaatcgtgtcttgccagaatcgtgcgcccatgcataatgggcgaatggaaaaacgcaaagaattcaacgagacgctcgcccgattgagatcggatcgtggcatgacgcagcaacagcttgccgagcggctgcacgtgtcaaggaccgccgtatcgaagtgggagacggggggcggctatccgaatcttgattcgcttaaagacatcgcggtgctcttcgatgtttcgatcgacgagcttctttcgggaagcgaggtattgggcgcagctgaacaggagaaccgcacggcttcggacagccggatcgctgcggcgttcgctgcgcttgacattgcggtgctggcacttgtctttctgccgctctatggaattccggaaccgggttttatcagggcggcgccgctgccggaatactatgcggcattgggcgagccggtggttctgacgtatttcgtaccgcttgtgcttctgcctctcgcgggtacggcggaagccgttacgcgtgctttcggcgcttcgccgcgcacggcgaaagcggtccgaacgatttccttcggcgtgcacgtgttcgccgtgctgctgtttgcagcggcgcgccagccttatgcgacggcgatcctcttcgcattgctggttgcgaagacggcgatcgcgatgcgtgcgctgaagcggcgggagcggtaatcggtccgtatggatgttcagatgctacgaagggtggttttcatggagttgacgatggtggcaggatggttgaatgcgacgctggccgggttcgatcttgcgattttcgcgggtcttcacggtttggcggaagctgccggatggttcttcacgccctttttcatgctggtgagcctgttcgccgaaaaggggatcggcctgtttctggtttcggctgtactcatgctgttcaagaatacgcgaaaggccgggttgtgcatgtttctggctgttctgtgcggagcggtcattacgaaccttgtgcttaaggatctcattgcgcggccgcgtcccttcgccgatgaggcggacgccatctatgggtggtggacgttcgtcggctctccgatcgagacgagtttctcgttcccatcgggccatacgacggctacgatggcggctatgacgggattgttcctgtgcttgcgaagcaaagcgcgatggctgtgcttcatcccggttgccctcatgggtctttcccgcagttatctgatggttcattatccatccgatgtgattgcgggcgttcttgcgggggcggcgggagcgggcgtcgcttatcttcttgtacgcgcattgtatcggtatttcgaatcgcatcctgaaaaccgcatctgttcgttcgcgcttggttttgatgtacggggcaagcgttccgatacgacaacgtagcccttacgggattccaacaaatcaacccccctggcttgcacatggtatgctttcatcacggcggctgggcatgtgggcgtcccgctgcactgacgggaatccatcggaaggaagcggtatgaggcgtttcgtaaaggcggtatcttcgagcattgtcatgcaggccgtcttgtcggttcttctcgggctttttttgacgatgtggccgcaggcgaccaccgtgacggtcgtgtatctgttcgccgcctatctcgccatcacaggcattgtatccctgatttcctacgcgcggcatcgctctgagcgcgatgggtaccggggcgctctggcaacggggatcttgatggtggtcttggcgcttgtcgtatttgtctttcccgaagcggtcgccggcttcttctcgctcattttgggcatcgtgcttgttatgagcggcgtattgaacgcggtgagatccgtcgaactgcggccctttggcggtggctcgtggctcgggacgctcatcgtcagcatcgccatcgcgctcggtggcgtggtgattatcgtgaacccgttcgatacgaccgtaacgttcgttttagtgctcgggttgcttctcgttgccaagggcgtgatcgatctcgttgtggtatggctcgcttcgagcaaatcgaaggcggcaggcgagtaacgcgcaaagcgggcgcacatgtgcatttagcgtttaccaacaaaatattgcaacattgcagcactgcgtcccatatggtgttcgtgctgctacaatactcttcggttgctttacgtcgaacgagtaaggtcttatgaaaaatgacacgaaggcggatgccaaggcttcacagggaaggcatgccgcagatacgcaggtccaagataccgtccaagtcgatggtcagtccgcccagccttccgattttccaagcgccgctccccgaaaaaagcgcgggcggaaggctctcaaggttttcgggatcgttctcggatcccttctggggttggcggtgctcgcatacgctgccgggtgcttctatttttccgatcggttcttccccgataccgtgatcggagaatacgacgtatcgctgaagacctcggcggaagcggaagaggttcttcaggcggcgttggaggattatgggctatccgtcgaggggcaggggctttcattcaagctcgattccgaagaaatcgggttaacccttgacagcgaggccattgtagcccaggcgctcgaagggccccgcatgtggatgtggccccttgagatgcaggaacatcatgatctggacagcgttctcgccgcaagttacgacaaggcgactttgcttgaatccgtgaaggagcaagtcgattcattcaacgaaaccgcaacgcagcccggcgatgcgaccgtcgcatacgacgaggcctctcggaaattccaggtagcccccgaggttcccggcaccgctctcgatcctgaagctgtggctgaggttgcggggaaggcggcctcgacgatggagcgcaaggcaacggtggcgagcggagagctgctcaaaccgcccgtgctttcggacgacccgatgctcgccgcttcgtgcgatgcggcgaacgagctgctcgttgccgatttcacgcttgcggccggttcggcggaagctgccatcgtcggccctgacaggatatcgagctggatcgtgttcgacgaagatctcaacccgtcgttcgatgagaacctcatggtcgcctgggttgacgagctcgctgcgggattcaacacgatcggcacggagcgcacgttcacgcgcgccgatggaaaagaggtgacggttgccggtggaacctacggttggtcggctgaccgcgatacgcttttgaccattgtcaaggaaggtcttgaaagcgggcagacggggacggttgagatccccgttttgcagagcgccgatctgtatgcaggcgcaggcgagcgcgattgggcgggctacgttgacgttgatctttcagagcagtatgcgcgctactacgacgatgcgggcaatgtgatctgggagactgccattatcaccggcaagcccaacgctgaaatggctacgccgacaggcgtgtactacgttacgacgaagacgggtccgacgacgctcaatacgtacgagagcggcagaaaggaaccgaagaagacggtcgttcagtactggatgccttttgtcggcaacgttatcggtttgcatgatgcgtggtggcagcccggttttggcggcactatgtaccgcgatggctacggaagccatgggtgcgtcaatctgccgagcgccaaggcgcaggaactgtacggcattctgcctgtgggggagaccgtcatcgttcactggtagggcttggcaaggcttcgctgcttggcgccgcgcgctctgttgcgatacggcttgcctagacggtcaggtcggcggtcgaaacggccagcacgcgggaaaggtcgtcgatcgacgcttcgatttgcgtgccgattcggccgcctgaaaacacgattctatcgaacaggatggcggtttcgtccgcgacggtcgtgaaagccttcttcatgccaatgggggagcagccgccatggacgtatcctgtgaggggaagaagctctttggatttgatcatcgcgattgatttctctttaacggcggtagccgctttcttcaggtcgagctcttcggcaacggggatcatgaatacgtagtgctctcccgatcgtccttcagtgacaagcgttttgaagacgcgctcgggttcgaggtcgagtaggcgggcgacttcgatgccgctgagcgcttcggggcactcgaacatgcgtgagacgtactcgatgccggctgcatcgagtacgcgcatcgcgtttgttttttggtcgtgcggcttcgccatgggtttgatcgatcggttcgtttaggcgttcggacgaatgaagttcgtcgcgattttcttctccatccggggatgttcgccgcccgcttcgcgatcagcttcgatgcagcgcaacatccaggccatgttcttgccgagcatccgcatggtctgcagaccctcttcgtcttggcgcacctgctcgacgctttgcccgtgtaccatgggccagtacgtgctcgagacgacgggcatcttgttgatttggaagtacttgttgatctgatcgatggccggcgtcgtgcccgcgcggcgagccgaggcgattccggcggcgggtttgaactgcatgagggagctgccggcgtaaaacatgcggtcgaggacggcgagaagggcgccgttggctcctgcgtagaaaacaggcgatcccacaatgtatccgtcggctcgctccgccttctcgagaaggcggttgaccacgtcgtcatcgaatatgcagcggctatcgccccgcttgccgcatcccccgcatccgatgcagccgcgcagggggtcccttccgatccatgcgatctcggtttcgattccctcggcttcaagtgcctgggccgcttcggccaaggcggtgtaggtgcagcgtctttcgttggggctgccgttgatgagcagaaccttcatgtgctttcctcgtctttctcgtgcggatacccgactcgatcgtcgcttgacggtcaaggcggatcagctcgcgtacagcgtgtcgattccagattagcagatactatggccgctgcaacggttttgcatcgcgtcatcatgtctgcgctatactgagcaatcatgagcgatcaaaacccacaagcggccgccttgggcggatgcgccttttccacctcctcgtttaccgcatcgggcgacggatatcgtcgtcccggcgatggattcgacaatgctcccatcggcgttttcgattccggatacggcggcttgaccgttgcgcgtgaaatcatcaaggcgcttcccgacgagagcatcgtgtatttcggcgacaccgcccgctgcccgtacggaccgcgttcgcttgaagaggttgacggtttcgtgcagcagatcggggcgtggcttatcgagcggggggtcaagatcgtcgtcatcgcatgcaacacggctaccgcagcggggctctcccatgcccaaaggtcattcgacgttcccgtagtcggcgtggtcgagccgggtgcgcgcgcggcggttcatgcgacgaagaacaggcatgtgggcgttatcgccacgaaaggcacgatcgagtcgggggcgtacgcgagtgccatacgcaacctcgatgcgggcattacggtgttttccgttccgactccccggttcgtcgagattgcggagcagggcatacgcatggccgaaggcccgatcgaggatttcacttcgcttgcatcgaaggtgtacatcagacctgcatttcaagagatagcgaaagaatacctcgaaccgctcaggcggtgcgagatcgatacgctggtgctcggatgcacccactttccgctgctgaaagcccttatcggcggggtggtcggccgcgaggtcttgctcatttcgtcggcgaaggaggcggcaaaggatgtcgccgagatactcacgcgaagggcgaagcgcgccgagcccggccataaggcgacgttcgaattctttacgacgggcaccgacgtaggcgaattcgaacgattcggcggtcgcgtgttgaggatgccgctcggttcggtgctgcacgtgggagccgatgatcttcggaaggtctgaatcggtcggcagcgccttttgcagccgaccatcatgcgctaggagcagatatgaaaaaagtagtcatcgcaagcaataacgcccacaaggtggaagagatcagaaccgctctcgatttcgaggggtgggagttctatacgctgtccgagttgggagttgaatcggatccggaagaagatgccgaaaccttcgaaggaaacgcgcgcatcaaggcccgagcggcttacgaggcggctggctgtgccgcgcttgcggatgattcggggatcgaggtcgacgcgcttggcggagcgcccggagttcattcggctcggtatgccggcggacacggcgatgatgcggcgaacaacgaaaagcttttgcgcgagctcggcgatgtgccgcctgaaaaacgcacgggacgtttcgtcagcgcacttgtgttcgtggatgaggacggcacggaaaccgtcgcgcgcggcaccgttgaggggcgtatcggatacgggcttcaaggcgatggcggcttcggttacgacccgctgttctaccccgacgtattcaagggagcgcttacgcttgccgaggtgagccaggatgaaaagaacgcggtctcgcatcgcgggaacgcgcttcgtgagcttaaggcaaaaatagcttcacggctctgaacttctgatataatgcaaaagctgttctagcgtcgggacgtggcgcagtttggtagcgcgcctgctttgggagcaggatgtcgcaggttcgaatcctgtcgtcccgaccatttcgggtctgtccatcttcaataatgggcagacccgaaatcttttccgaggcgattcgtctgtcggccggatggcctttgcggcgtgcggatcggcggggcgccgtttttcgggctagcgcttggggtcgcagcgattttgccggttgcgcgaacgcgtttgtcgtattttcagaacccatgcctctgatctgcccttggataccgcaagttgtcatgagattctcgaaaaagaagccgaaagttggttgagcaatggctttcgcgctggcactatggggatgtcggccgatccgacgacacgaaaacaaaaggatggttccatgagctttcgcgataacctgcaacatctgcgtgcgacgcgcaacatgacgcaagaacagcttgccatgctgcttggcgtgagccgccaatcggtatcgaaatgggaggcggagcgtgcgtaccccgagatggacaaactgctcaagctgtgcgatctgttcggttgcacgctcgacgaattggttttgggcgatttgaccgatcgtccgaccgatgcggtctctcgcatgccggcgcacgcggtctcccaggatgtgacgggatacgatcaggcgatgcgctcctttgcatggaagtttccgcttggcgtggttgcgatcatcgtagggttttcgctcgcagtgctcttgtcgggtcccgaattctcgtcaggcgatccatctcagagttatgcgaccgtgctgatgcttgcgggcatcgccgtagggtttgcgctcattcttcccgcatggtctgcgcgcaacgggtttcgcaaagcgcatcctttcgtggaggacttctacactgccgaccagaaaaacaaggcgcgttccgctcggacggcggggatcgtcgcgggcatcgggctggtcatggtcggcctcgcattcactatggtgctgtacgaggcgcaatggcttgcggggtccattccctttttgttcattgcggcgggcgtgttcttcatcatgcgcggatgtttgctgaaatcacgttgcaacttggatagatacaaccgaagatcgctttccgagttagatgatgtgcagatcgacgccttggatgatgcgggactgcggacgcgcgcccgtcgagccaagcgcgatcgcggcatcgttgtcatcgtcatgtgcgtggcgacggccgtcgctttggtgcttctcttcgtgcccgtgttcgatgctcagcgatggttctggctggcttggccggtcggcggcgtgctgtgcgtggcgatgcgggcgttttcctcgatgagggaagacggataggcgcacgtccgcaagcgcgatcgagtttttcttcccgatcgctgcagcatcgtattcgaaaaaaatcatagacatagacaaacaatctgaaagcagagcagaggcctctttgcctaaggcattgctatccgatgccgcaacgatgggagttcgtatgggttccgcgattattgccagcaacgtgaggaaatcgttttgtgcggggaagggccgcgcccggcggtcgatagaggtgctgagaggcgtcagcctgcgcatcgaactcggtgagatggtgagcatcgtagggccgagcggttcgggaaaatcgacgctcctgtactgcctttccgggctcgaagcggcggatgagggctctatcgagctgatgggcaggcaggtcgtcaaggcgaaccgcagcgcactgtctaagatccgcagggatcacgtggggttcgtcttccaatcgtacaacctcatcccctcgctgaacgtggaagagaacgtgtcgttgcccgcgcggctggcgggccgccccgtcacgagcgagcagacaggggcggtgctcgaaagcgtcggcctcggcggacgagagaaggaccgccctggggacatgtcgggcggcgaacagcagcgcgtggccatcgcccgtgcgcttgtcgggtcatcggatgtggtgtttgccgatgagccgaccggggcgctcgattcgaagagcgggcgcgaggtcctcggcatgctgcgcacgatcggcgacgattccaaccgatcggttgtgatggttacccacgatctcgaagccgcttcgttggccgatcgcgttcttgtgctgagggacggccggattgtgtgcgaaatggggcgttcgagtgcgcgtgagattctcgaagccatgggggtgccgagatgatccggctcgcgctctccgatctgcgcgatcacgccgccacctgggtcggcgcattcttcgtggcgatagcgtgtggctgcataggcggctggatcgccttcctgcagtcaacggctggttcgtacgccgacccattgcgcaccgccctgcagaatgccggctcgatgatgctcgttttctcgctggtcgcggccgtggcggtgctcgcttcggcggcgaatctgacggtttcggcgcagcggcgctcctacgctttgtggcagctggcgaacgtgaagccccgtatggtgagcgcggtggtgctcgtccagcttgccgtggtggcgattgcaggcgccgtgtgcggcacgctgctcgctgcgttgagcttcgagcccttgttcccgctcgtgttcggttcgcgagacgaaatcgcccagctgacgccttatgccgagctgtcttttctgcctcgggtgtggcttgtggttgcgggtgtgtttctgtgcggcgggttgaggggtgcgcgcgctgcggggagaacgcctcctttggccgtgctgcgcgaaccggagccgaagcgcatggggatgacgtggctgcgcgcggcggcattcgcgtgcttggtcgtctgcacgtgctggatgggttccattctcatcggatcgggcgtcgatgaggcctttacctggtcgatattcatgcctccgctggtggtggcgacgctggtgcctgtcgcgcccctcgtgctttcggcgctgttgcgtgcatggacgtcgctggttccccaaaagcgatggatcgcgtggtatctggcacgccgcgccgctcgcttcggtcttgcggcaagttcttcggttgaaacacccgttatggtggggttcgggttggtgtcgggcgttttctccgtcgttgcgggcggggtcgcttttctgaaagaccagggcgtaaccgacgccagcggcctcgatgcatcggcggctttgctcatgctcggcggccccgttttgctgtgcgcagtcggggcggcggtcagcgtggtcatgtcgtcgcgttcccgctcgcgcgatgtcgccctcctctccgcagttggagcgcggcctgaaacgcttgtggcggctgccgtctgcgaggcgttcatccataccgtcaccgctactttgacgggtgctgttgcgacgatcgcagctggcgctatcgtcaactacgcttacggatggccctttttcgccggtcttaccttcggggaggggctcgtcgtttcgtttgcggggttcgcactggttcttgcggcaacgctcgtgcctacctgtatggctctcggccaggatgctgctgtcgttatcgccgcgacgcaggaatgatccgaacgccgaatacggaagtttcggaatttttggtatcggaagcgtgtcaatcggccagggaggccgaccgtgctcgatcgattgtgctatataagattgcatgctctagtaagacacgcaaacaatgggagtgacatgacagaacagcaagcaggttggtaccctgatccatcgggagacgtttcgaagcttaggtattggaacggggtgcagtggaccaacgatttcgctccggttcagccttcgcaatcgcaggcctgccaaggtgcagcgtatacagcgcccgcgtatgggcagcccccttatcagcagccctattcgtatgagggaagcaccgatcaaacgttgaggctcgtggcgttcatcctctgcctcgtctccaccgtatcggtggggtggaccatcattccgctcgcctggatgattcccatgaccgtccactgctgggggctttacaagggcacgaaggccaacacgacgggcttcggcgtatgcacgctgatattcgtcaacctggtcggcggcatcctgcttctggtttcgagaaaagaccgctgatctggtgggcgccgtgccatgcgccgagggtgcacgctaaagcgatgcttcgatcgtctgtcggcgggcgatcggttagctggatgaattgctgcagaattcaaagacgaaattgcggtaattcttcttttcaacacgtcgcatttcgtgtatcataccaaaggttgcttggcagcgatacggtgccatatgcaatgcgggtgtggttcaatggtagaactccagccttccaagctgacaacgcgggttcgattcccgtcacccgctccatgaatagcgcaggccagggtttcgaaaccctggccttttcttatttgggggccgagaggcgtagcggcagggctgcaggccgtagcgggcgtctggcgcattgcttcgagcccatgggctcgaagccgtccgacaaaaaaggggccgttgcggcccctgaggttcttaagctactttgtacgctctgctgcgttgcttcttcttttttggtttcggggcttcctggccaccgtggcggcattggtcgctgcgactgctgcggccgtcctggtcgctgcggcttccgcgcccgcctttgtcgttgcgaccgttgcggttcgggggctttcgcttgccgcgggccttcgaaccgccgcggtcgggggcgactcccgtgcgtttgcgccctgcgccgctctggtttgtgcgagcgggctctttgcgtttcggcttctgcgcatacgccccgatatccttcaaacggtcgaactgctcgtctccgcctatgagcatttcggccaaagcgacggcgacctgcttctccgagccttcgaacagcgggttttcgagaaggtcctccacgagctttcgggcggctttccccggacggttcttcgcgtgcgattcgatctcgaggacggtgcgggctacggccttgtccatgatttcgctgtcggtgggcagcttgcgctcttcgatggcagtgcccgtgtacttcataagcccgcgaagcgtcgcctgctgcttgccgttgcagatcagcgtttgcgagacgcctcgcttgccggcgcgtcccgtgcgtccgatgcggtggacgtaatattcgaagctttgcggcagatcgtagttgatgacgacgtcgatgtcgtcaacgtcgatgccgcgcgcggcgacgtcggtggctatcagggcgtgtacgctgccattgcggaatccttgcatgacctgcatacgggccgcctgcgtcatgtcgccgtgtatccccgatgctttgaagccctgtttgcgaagcatctcggccagttcgtccaccatcgatttcgtattgcagaatacaacggagcgctgcccgttggcatgcatcagaagactgagcacgtcctttttcttgccctgcgcaacgcggaagtaggtctgctcgatatcggcttggttttccttgccggaaagcgtctcgacggtcagcggatcggtgaggaaggtgttggagatcttgcggagcgatgtggacatggttgccgagaacagcacggtctggcgctctgcgggcgtggcgttcaaaatggtttcgatatcttcgatgaagcccatgttgagcatctcgtcggcctcatccaagatgacggtttggatatgatcgagcttgagggttttgcggcgcatatgatccatgaggcgcccgggggtgccgatcacgatgttcgcatggcgcagctgcttgatctggtcgggcatcgatgcgccgccgtacacgacggcaagcgatacgccttccttgtactttgcgaacttcttcatctcgcagtgaatctgcagggcgagttcgcgggtgggggataagacgagcacctgtgcatggtgcgaggtgccgtcgacgccctcgatggcgggaatcgagaaggctcccgtcttgcccgacccggtgcagctgcgtccgataagatcgcgtctttcgagcagcaagggaatggcgcttgcctgtatgttcgtgggcttggcatagcctatttcgtcaatcgccctgatgatgtacggcgaaagcggcatttcgctgaatgccgcggggttggtctgggttttctgcatatctcctcattcgacgttcgattatgtgcggcggaagggcggcgaggatgcgcaagcattcgtttcgctgccggtttccggcgcggcaaagcaccatccacccgtcaaacaaagagatgaaccttatttgcgtgggaagaatcttgcgctacatgaatcatggaaatgggtcatgtggatggttttgacgcctatgcagtatatcgatgcaacgggctttttcgctggcggtgtgcagagaaccccagaaaaacacgaatgcccgctttaccgcgtcggcttcgagcgtgcatgaaaaaacccgcttgcgcgggtcttttaaagttcgatgcataggtgcggctgtgcgcgggcttgcgttcaatccgcctgggttgccaggtatttgataatgtcgtcggattcgtacatcgccttgccgtttatcacgaggcaggggacctgcttcttgccgccgatgcatacaaggtcgttttggatgccgggctgtgtggtgtcgcgcatatcgagcgtgatgcctttttcatccatgaagcgcaggactttctggcaaaatgggcaggtctttttgtagtatagcgtgtggtccttgagatatgacacggctgctcccttcgtacaatccccggattcatccgcggaaacgcaacagtgcactttatcatactaaaggagtgagcaaacggggccatcaagggttttcttgttgccgagcggttgctttccttacgtgagacctccatcgatactgggaaaggacggaaagagcgtcgcccgctcgggttttatcggaccgtgcgggccgtttcgggtcgcacggcgccacgcctgccgaatcgaggcggacggtggaagcgcgatggcgtccggcgcgcaacgtgcaggggatccgtcttgacgaaggttcgaaactcaacggagcgtttgttgtgcaggctggacggtgcggataccatgcccttcggaggtacatgcgatgaataacgagaaaacaggaatccttatcaagaggctgcgtcaagagcgcggcatgacgcaaaagcaggtagctgatcgccttcatgtgagcgatcgtgcggtatcgaagtgggagagaggctgcgggtctcccgacgtgtcgcttctgaggggcctggcagccgttctcgacgtcgatgtgcagagcattttggcgggggagctgaacccgaacgacaccgatggaggaaacatgaagcgaatgaggttctaccgatgccctacgtgcggaaacgttcttacgagcacatccgaggcggaaccgtcgtgctgcggccgatccctcaagccgcttgaggctcgcgcggccgaaggggagcacggccttgcaatcgaagaagtcgaggacgagtactacgtagtcatggaccatcccatgaccaagagccatcatatagcgtttgtggcctgtgcaaccgatgagcgcatcatgctggttcggatgtatcccgagcagggtgcccaggcgcgctttccccgtatgccccgtggcgtgtggtacgcatgctgtaccgagcatggattgttcgagcttcggggaatgcagcaaggtcgatatgcggggaaaggcatataagcaactctgtatgcaacgtctctgcgcgggcgatgggaaaatgtgcgtttaggggtggcttccgccatttggctgcagcttacgatatatcctcaaaggatggtataaagttcaaacatatgatatcatttaaaatttttttaccagtgatgttgtataacgagaaaacgagggcgcggggaagtgagaaagaatctctttctcatcctttctcttcgtcaaacaggatgagaagagttgcggtataatacctacgcacgcaagtgccgcgacgcgctcgtagctcagctggatagagcagtggacttctaatccgaaggtcgcaggttcgaatcctgccgggcgcaccagtcagcatcagcggaccggctttcccgtcggtccgctttttctttgcaaggtgcgaaactcccgccttcttcgaggtcgatatagccgcaatgcaatacctgaaaagggaaaatgtcaggtttcaccctttgtggtcccggctgagaagcgcttgttttcggcatgagcgcttacacggcgaaggggagcccaacacgcggcggcgcgcgatcgaaggctgcgccgaacgggtgggatcgcgtcggaaaaccgagggcgtttcaaccattctgcatctttgccaccctttatgcattcagattcataaagccccgcaatccagaggcgccgttcacacggaaagcgccgatccaggtgttttccggtcactatttcgctttactgcggtggagtaaaaaaccgaagctttttgaaaagaaaccgttttgtcaataaccgttcaccgctcaaaaacgaccgctcgccaatcctttatttcagttcggtactacctgttgctttttcttttcacccatgagattttggccgtgtcatgcggttgtgctcgaaatatgaagcaaaaccgaaagtcgtaaacgtaaagaatgcataaaagaaaaggagggttgccatggctggtgtaaacgtcaaaagtgagatcaagcctttgaaaaaagtcttgctccaccgaccgggtaaagagttgctcaacctgacaccaaacacgctcgaagagcttctgttcgacgacattccgtttttgaaggtcgcccaggaagagcacgacgcgttcgccaagattcttcgcgacaacggcgttgaagtcgtttatctcgaagaccttatggcggaagtgctcgatcagaagcccgaattgcgtgaacagttcctgaagcagttcatcgaagaggctggcatccgcaccgatcgctatcagaagataatcttcgattatctcaacgataactacaaggacaacaaagatctcgtcatgaagaccatggagggcatcaaccttaccgagcttcataccgataagagcaactctttggtcgatctggtgagcgaagcgtccaagatggtcgtcgctcccatgccgaacctctatttcacccgcgacccgttcgccatgatcggcaacggcgtctccatcaaccggatgtactcggtcacgcgcaaccgcgagaccatctacggcgaatacatcttcaagtatcatcccgatttcgagggtacgcccgagtactacagccgttacaacaccttccacatcgaaggcggcgacattctcaacatcaacgataaggttctcgcaatcggcatttctcagcgtaccgagcccgatgcgatcgatgccatcgccaagaacatcttcgaatcggattccccgatcaagaccattcttgcgttcaacatcccgaactcccgtgcattcatgcacctcgatacggtattcacgcagatcgactacgacaagttcaccgttcatcccggaattctcggaccgctgaccgtgttcgagatcacgcccgacgacaacggcggcatcaaggtcaaagagatgcacgataccctcgaggatattctcgaagcgtacatcggcaaccccgtcgagctcattccctgcggcggcggcgatcgcatcgcggcagagcgcgagcagtggaacgacggctccaacacgctctgcatcgctcccggcaccatcgtggtctacgagcgcaacgacgttaccaatgccgtgctcaaggagaagggcctcaacgttttggagatgccctccgccgagctttctcgtggccgtggcggcccgcgttgcatgagcatgcccatctggcgcgaggattaatccttgcttgattgatcgacccagtcggcccccagcctcgcggcgggggccgatcgaggcgaggcggatttaacttggcaccgcctgtttcacagcaactgtatatgcgctatcgaaaggaatgagcaatgcctactagtttgagtggacgtaacttcttgaagctgctggatttcacgcccgacgagatccgctaccttatcaagctgtccaaagagttcaagaacctgaaattgacgggcaccccccatcgctatctcgaaggcaagaacatcgttctcctcttcgagaaaacatctacccgcacccgctgcgcattcgaggtcggcggcatggacctcggcatgggtgtgacctacctcgatcccggcagctcgcaaatgggcaagaaggaatccatcgaggatactgcgcgcgttctcggccgcatgtacgatggcatcgagtatcgcggttacgatcagtcgatcgtcgaagacctcgcagctaatgcgggcgtcccggtgtggaacggccttaccaccgatttccaccccacgcagatgatcgccgacatgctcacggtggaagagaacttccccacgggcatcaagggcctcaagttcgtgttcatgggcgatgcccagaacaacgttgcgaactcgctcatggtcgtttgctccaagctcggtttgcacttcgtggcctgcggtccgaaggagcagatgccgcatgaggatcttgtcgagacctgcaaggacatctgcaaggaaaccggcgggtcggtcacgcttaccgaagatgcgcaagaagcatgcaaagacgcccatgtcatctacaccgacatctgggtatccatgggagaacccgacgagctgtgggccaagcgcatcaagctcctcgagccgtatcgcgtaaccaccgaactcatgtccatcgctgctcccgatgcgatcttcatgcattgcctgccttcgttccatgacaccaagaccaccatcggtgccgacattgccgagaagttcggcgtgaaggagatggaagtcgaggacgccgtgttcgagtcgcatcagtccaaggtcttcgacgaggccgagaaccgcatgcactccatcaaggccatcatgtacgcgaccctttcctaaagcgaaaggagatctgttatggcttatcagaaaggcgagggcaagagcgtggtcatcgcgctcggcggcaacgccctcggcgacaccccgcaggagcagctcgagctcgtcaagaacaccgccgagcacatcgtggacatggtggccgagggcatcaacgtcgtcgtgtcccacggcaacggcccccaggtcggcatgatcaacaacgcgttcgactacgcgagcgcccacgacggcaagacccccgagatgcccttccccgagtgcggcgccatgagccagggctacatcggctaccagctctcccaggccatcctcaacgagatgaagcgccgcggcatcatgcgctcgacggcctgcgtcgtgacccagaccgtcgtctaccccgacgacccggcgttcgacaaccccaccaagcccgtcggcgccttcctcaccgaggaggaggcgaggcgccgcgccgcggagaccggcatggtctacaaggaggacgccgggcgcggctggcgcatggtcgtcgcctccccgaagccccagcgcatcgtcgagttcgacgccatcagggacctcatggacgacggctacatcgtcgtgtcgacgggcggcggcggcgtgccggtgatcgagcgcaacgactcctacgagggggtccccgcggtcatcgacaaggaccgctccagcgccaagctcgccgccgacttcagggccgacatgctcgtcatcctcacggcggtggagaaggtcgcgatcaacttcaacacgcccgagcagaaagagatcgactcgatgacggtcgccgaggccgagaagtacatcggggagggccagttcgcgcccggctcgatgctgccgaaggtcgaggcctgcatagagttcgtccgggcccatcccgagggccgcgcgctcatcacgtccctcgagtgcgccgccaagggcctcaagggcgagacgggcaccgttattaccaggtaagtgttttttagcaacaaggggtgctttatcaggcggacggagcctggatcgtaagagccataggctcggtccgcctgcgatttctcgttcaccgtaaacatcgatccctactaaaaaggaggggctatggccgagaaagtaaaggataagagtaggaaaaagcgagcgataagctcattttccattcttcttatcattctgatcgttcttgcgatcatcacggtagtcatgtcgctcgcaggcgtcgaaggcgtcgaaggcgcgacgattgcgaatgtcgcgactgctcccgtcaagggctttaccgacgctctacccgtttgtctgttcgttttgatcctcggtggctttttgggaatcgtcaccgaaaccggagctctcgatgccggcatcgccgcattggtgaaaaagctcaagggcaacgaactcattctgattcccatccttatgttcatcttctccatcggcggtacgacctacggcatgtgcgaagaaacggtgccgttctacctgctgctggccgccactatggttgcggcgggcttcgatagcgtcgttggtgcggctaccgttttgctcggtgccggctgcggcgtgctcggttcaacggtcaacccgttcgctgtcggcgctgcggtcgactcgctctccggcacgggaatcgcgatcaaccagggcacgattatccttctcggtatcgttctctggctcgtcacgcttgccatctcgatcgtgttcgtcatgcgttacgctaaaaaggtgaaggcgaacaagggttctaccatcatgtccctgcaggagcaggaaaccatgaaagaggagttcggcgaggctcagcaggaggctgtcgatgccgaagcgaaccccaatgagaagcttctgaccggtcgccagaagggcgccctcgtcgttttcgcactgaccttcgtcatcatgatcatcggcttcatcccgtggggtgatttcgatattaccgtattcgaggccggggcggctaccgaagaggttgtaacgcccatcaccggcgaggaaatcgctgcatcgtgggacgatgctcaggttggcggagcgcttgagattcccgagggagtcgaaggcaccgtggtaagcgaagagcagatatccgacggttggtcttcgttcctcacgggcgtgccgctcggcggatggtacttcgacgaggcatccacgtggttcctcatcatggcgatcgtcatcggcgttgtcggcgggctttccgaaagccgtttcgtcaaggcattcatcaacggcgcggccgacatgatgagcgtcgttctcatcatcgctctggcccgttcgattaccgtcctcatgggcgaaacgggtcttgacatgtggattctcgagaacgctgctgcggctcttgcgggaatgtcggcgatcatatttgccccgttgtcgttcttgctctacgtggtgctgtcgttcctcatcccgtcttcttcgggtatggcgaccgtgtccatgccgatcatgggtcccttggcgaacaacctcgggttctctcccgacgtcatgatcatgatcttcagcgcaggcaacggtcttgtgaacctgtttactccgacgagcggtgccatcatgggcggtcttgcgctcgcgaaggtggagtactcaacttggttgaaattcggtgccaagctgttcatcgttctcggcgtcgtttgcatggtgatcctcaccggagcaatgctgatcttgtaatgaatcgctgaaacgctcgtttacgtgaatcgaggaaaggcccctgcatgagcgggggcctttcgttcatttccccgtgatcgatttagccgataggtcatctgtttttcgaaaaactaccctcgcttcgagcctcgtataatcaaagcaacgttggtcgagaagtatcacgtgaggagttgttatggatgaaggacgagtaagccaagagcagctcggcgctcaggcgcagggggaagcgaagccggtcgtgaagacgcaagacgacccgaccgggcgcaaatggacgtgggaggaagacggctataccgtcattcgctccaacgcgcggtcgggcccgggatgtcatgataactgcggtgtgctcatgtacgtgaaagacggggtgctcgagaagatcgagggagaccccgagaatccgtacaatcagggcagactctgcccgcggtgtcttgcattcaaggagatgctgtatcacaaagatcgcctcaagtatccgatgaaacgcgctcgcgaggatcgcggaaagaacacgttcgagcgtatcagctgggatgaagcttacgataccatcgaacgggaaatgaagaggatcatcgaagagtacggcgcgcatgccatatgggtcacgcagggcaccggacgggacatcaacgggtacggcccccttatggcgcagtacttcggcacgccgaactacggcaccggtttcctttcgggtcaggcatgctacgctccccgcattttctcgacggctctgaaggcgggcggcctgttcgtatgcgattactcgcagttcttccccgatcgctacgatgatcctcgatgggaggctcccgagtacatcttgatatggggcaacaaccccacggtggcgaactccgacggcacgctcgggcattgggtcgtcgagagcatgaagcgcggcagcaagctcatcgtcatggatccgacgcttacgtgggtggctggcaaggcggatgtgttcttgcaggtgcgccccggcaccgatgcggcgcttgcgcttgcgctctgcaaccagatcatcgaggacggccttgaggacaaggagttcatcgacctgtggtgctacggcttcgacgagttcaaggagcacgtgaaggaatacacggcgagcagggccgcagaaatatgcggcgttgacgaggagctcatcgtcgaggcggcccgcaagatcggcaatgcgaagtcggcgtgcctccagtggggcgtcgccatggaccatacctccgagggtttcatcacgggtatggcttgcttcgacctcatggcgcttaccggcaacttcgaaaagcccggcacgatggtcgccgcgcgtccggcttacaacatgagcgtcacgtggatgcccaacgagaaggtatggagggaatgctccgctccggtcgagcatcccgagctgtgcatgaacaccaaatacccggctttgaaagccatggcgtcgacgagtccggatatgctgctcgaggccatggagacaggcgagccctatcccatcaaggctatgttcatgatgcagaacaatgcgatcacctgcatgggggcgcagccgcagcgcattttgccagcgcttcagaagaccgagttcaacgtatgcgtcgatctgttcctgacaccgacgattcttgcgtgcgccgacatcgtgctgcccgcggcctgcttcgccgagcgcatcggcatcacggggcaccagccctacgctctcggctcgatcgcccaagccgtcgagcctctcggagaatgccgttccgatcagcgcatcatctacgagatgggcagccgcttcatcaccgatgaatacaaacactgggatgatgaaaagggattctacgattacctgctccgcaagacgggcttcgactacgagtcgctgaaggagcgcgtgtgggcctatcccgaattcgaatacaacaagcatgagaaaggcttgctgcgccgcaagggagaactcggattcgccacttcgacgggccgttacaatttctactgccccgagatgcttcatttcgggctgtctccgctcgcgacgtacgaggagccgcctgagagtcccgtatcccgtcccgatctggctgaaaagtacccgcttgtgctgacgaccggagcgcgaatctggggattcttccattcggagcatcgccaaagtccttccatgcgcaagatccatcccgatccgaccgttctcatccatcccgaaacagcggcgaaatacggtatcgccgatggcgattgggtcaaactcgagaacaatttcggttcctgcaagcagaaggcgaaactcaccgttcgcattcgcaaggatacggtgtcggccgaccacgcgtggtggttcccggagcgcgatcccgaagacggcacgctgttcggggtcatggaatcgaacatcaacaagctcgtccccatgcgccctggcaaagtcggactgggggcatcctataagtcgcagctgtgcagcatagccaagatcgaggagtgaatgacatgaaacaagtgcttgtagtcgattacgatttctgctcgggctgccattcctgcgaaatcgcttgccagcaggagcatggcttcgatcccgaccagtatggaatccaggttacgcagatcggacccgatcagttgaccgaaaggaaatggcagtacgatttcctgcccatcccgacggatcgatgcgatcggtgcgcgagccgccaagcggcggggaagcttccaagctgcgtgcagcactgccaagccggatgcatctacgttggcacgcttgaagagctttccgagaagctggccaagaagaaagtggcgctgttcgcgtaagccgcggatgcgcgtgcgaaaacagggtttcgggctcgtttgcggggcgggggtgttcctccgccccgttttcgtgcggtacaatacgggcatcactcgaaaccgtattgggggctctatgcgcatcgacacgctctatgaattcttgctgctgacatcgaatctcagcttcaccgaaacggcaaagagcttcttcatttcgcagtcggtcctgagcaaccacatctcggggcttgaaaaggagctcggcattcggctgttcgtgcgcgatcgccattcggtcaggctgaccgaagccggaacgctgtttctcgaagacgcccagaagatcgttgtcgattacgagcatgcgctcggccgtatatcccagtatcgcgacggcgtttcatcggttatccgaatcggtttcctgctcggttcgtacggttcgtttctgccgctcgtgtgcaggcgttacagcgagcagcatcccgaggtcggcttccatttcaagacgatggagataggcgatatccaggcaaagctcagcgaaaaccgcatcgacatgggatttacgctgttcaccaaagatattcggggagggaaatacgcataccactgcctgtataaagatcgctacaagcttgcggttcccaagacgcatcgccttgcgaagcgcgagagcgtgagtttggcggatcttgagggcgaaacggttctgtcgccccggttcagccgcacgcgcaacaccctttcgcaggtgggggtgagacttcgcaacgccggcatcgaggtgcgcaccgacgatcagatcgtggattcaggcgcccttatggcaacgcttgtggcaacggaccatgtggcgatggccctcgaccaccataaggtgtacggcagcggcaacgtcgtgttcattcccatcgacgaagagggcatggatctgtgctgcgggccgatctggaagaaatcgaaggagaccgacgtgctgctttcgtttctcgactttctcgtaaaagaaaccaagggcttcacgaaggatgatttcctgtcccgcgagggcgccgaggacctgccgccgctctgattgcgcccgagcgcggtcttgcctgctggcatctgcggtcgactatggcgttcgtgcgcatatttcatggatgccgagctcctgtgatagcatgactgggatatgcggaatggtcatataatagaatatgttccgatataacgatcctgataaatgcagccaaaacgaataggggggtctaacggtccatgatgaaattccaatcgaaatcccgatcggcgctcagcgctttcgtcgcgctgtctttggcgcttgccctgatgccgatcgcaggcgccaaggcgtacggcgaagagggcgatgagctttcggggcagactgcgggttcggaagaggtccgatcccaggagtcgaacgagcagcagggcgatgcatccgatccggaaaccgtcgataccgcacgtggaaccgacggcgaaaccgaaggcatccaggaaggcgattcgcaaaagggcgctcctcaaaaagaggagggcacggttgtgatcctgccatccgaggaagatatggagaaatccatgatcggcctcgatgagcttgccgattccgactcgggcatatcgacgttttcgcttgatgccgaaacgcgggcggcaagcggcgtcgccattgagtcgtacagcggcgccgaccgcgtcgaaacatcggtcctgacggccaaagcggcgtttcccacgtccgattatgcgataatagcgggcagcgactcatggcccgacgcgctcgccgcatcgggtttggcaggcctttaccagtgccctatcatgctgacgcagacgggaagcctcgacagccgcgtgaagcaggccctcaaggatatgggggtcaagcacgttttcattcttggcgacaagtggagtatctcggataatgcggcaaacgaggtcaaatcgaccatcggcgaacaacctgtgagattgcagggtgcggatcgctacggtacgcagatggccatctacgagtacggcctgaataacagcgatggcaagacgtggaaaagtgatcttgcaatcgttgcaaacgggggagacacccacttcgccgatgccctttcggcatcttccggtgcttacgcgaagggggcgccggtgtttctcgtgcaagattcgggcgaattcaccagtgcacagaaatcggctttgaaagcaggagcatcgaaggggctgtttcgtacgaccatggtcgcaggcgatacctattcggtgtcgaaaggctccgagacgtatcttaacagcatcggcgtttcgagcgttgtgcgaaagggcggttccgatcgctacgaaacaagcgctctgatcgccgagtggatggtgaacacgcagggtctttcgtgggacaacgctgcgttcgcaacaggagatcttgcctacgacgccctcggcggcggcgcggcgcagggcaaggcgaactcggtggtgctgctggtgggcggcaacagggcggcggctgacatgctgatcaagaacaagggctcggtgaacacctcgatcagattctacggtggattgccgtcaatttcggcaagcatgcgctcctacatcactgcggggcttggaatcacaacgactacggcggttccctacaacatcacgctcgatgcgatggtcaactacgagtcgaagttctacggttcgtcggtgtcgaaagacacgcttcgcaagtatctcgacccctcgaacgtgaaggcgggcgatgcggcctattaccagtatgccgatatcgggcagggctataccggcctgttcacggcagagcagcttgatgcgtatattgcgaaaatggcctctgcgtactgggaagggcagactggctacacgagcaagcttcgcggcatggggcaggctgtcatcgacgctgcaaaagcgtacaacatcaacgaggtgtacctgttgagccatgccggcatcgagagtgcatggggttgctcgaaccttgcccagggaaagatatccgggtattcgggttactacaacttcttcgggattgcggcttacgattccaatccgggaaacggtgccgcctacgctaagaatcatgggtgggacacgcctgagaaggccctcatgggagccgcgcagttccttagcaagggctacatccacgatacctcgtttgcccagaacaccctctacaacatgaaatgggatctgttcaacgcgatcaactatccgaattcccactatgagtacgcgaccgacgtccagtgggctcaaaacattgcgattacgatgaacgcgctgtacaaggcccatgggatcagccaatccaattcggggctttcgttccttgtgcctcagtacaaatagcatttcacgataaagcgaagcgggaaaagcaaagtccggaggcaagtgcttccggactttttgcttggctgtcgcattcgggcgcgagcggcggatggacgcgccgccgtttacgcgaggccgctagagggcctttttcatccagatgtgctcgacgtgctcatcgagttccacttcgccgtacgaggcgtagccatgcgcttcgtagaaagaggttacggagcactgggcatgcaggtgcatttcttgggcgcccgcttcccgagcaagacgctccgactcttcgagaatcatgctgccgtagccgtgcttgcgttggttctgaagtacggcgagccgtccgaagatatagcgggcgggatggtcgggatcggggaacgtgcgggcgcacccgataagctcgtcatctgcgtatgcggtaacgtggatcgttgaagcctcgtcgtcgagatcctcgaactcgttttcaaatccctgctcatccatgaagaccgcagttcgtacggcgaacgcatcgactttgtttccgtgctcgaatcgtatgctcatgaaaagcctttcggttggtcgggtgttcagtttccatggtagggcaagcctttccgctgcgcaaacgcatcggctgctcgggcgcgcaggtttttcacgccctgcgcacggggcatacgtactttatatgacgagatgaatatgggactttctcgatcgtaaagatggtaaaatctattgcaactgtacggtatcagcttacgattgaaagaagcatcatgcaaattcgcgaacaacttgaactcgtggtgaacgatgccctgaaggacgccttggcgaaaggggctcttgaactggacgaagcgccttcggcggctttggagcgccctcgcgacgaatccaacggcgattgggcttctacggtggcgatgcgctgcgctaaacaggcgaagaagaacccccgcgaaatcgcccagatcatcgtcgaccatcttcccgagaacgatctgatcgaatctgtcgagatcgcaggtcccggcttcatcaacatccgccttacccccgcttcgtatcaaagcgtgctcttcgatgtgctcgtgcaaaaggagaactacggcaaaggcgagatcccggagggcatgcgctacgtgaacctcgagtacgtttccgccaaccccacagggcccatgcacgtgggtcacggccgttgggcggcgctcggcgatgcgacggcccgcgttatgcgccatgcgggctacgacgtgtacgaggagttctacatcaacgatgccggcgtgcagatggacctgttcggcaaatcggtcgcctgccgctaccttcagcttctcggccaggatatccccatgatcgagaacggctacggcggaggctacatcaaagacatcgcccagggcattatcgatcgcgatggtgacaagtgggtcgatgtcgacgaggaaacccgtacggttgaattccgcgagatcgcatatgccgagatgttgcagcttatgaaagatacgcttgcgggtttcggcaacaagttcgattgctggttctccgagcgcagcctctacgtcgacggtcccgacggcacgagcccggtatcccgttccatcaaggccatggacgagaagggctacgtctatgagaaagacggtgccacctggttccgttcgaccgcgttcgacgatgagaaagaccgcgtcatgatcaaggagaacggcgagttcacctacttcatgagcgatgtggcctatcactacgataagctttcgcgcgggttcgaccacctcatcaacatctggggcgccgaccatcacgggtacgtgaagcgctgcgaagccatgctcgccgcatggggccgccccggcgccctcgaggtcatgctcggccagcttgtgaacctgtaccgcgacggcgaggccgtccgcatgtccaagcgcaccggcgagatgataacctttgccgaactcatcgacgaggtcggcgtcgatgcgactcgctatctgatgctctcgcgttcgcaggatcagccgatcgatttcgatatcgaggttgccaagaagaaggatgcctccaatcccgtctactacgtgcagtacgcccatgcgcgcatctgctcgatcctgcgcaaggccgcgcctgcaggggatgccgaggccgtcgtggccggcacgaagagcatggacgagctcatcgagaagcttttcgccgacgaagcggatctctccttgctgacccatgaatccgagattgcccttatgcgcaagatgtcggagttcggcgagcttgtatccgacgccgctcgcgatcgcgccgcgttccgtctgacgcactacgcacaggatcttgcagctctgttccatcagttctatacgaactgccatgtgctcggcgaggacaaggagctcgagaaggcgcgtctgagcctcgtcaacggcacgcgcatcgtgcttgccaaggcgctcgatctgctgggtgtatcggcgcctgctcagatgtagcagcttatcgccgggcgatcgaggctctgaaaggagtgcttgcgtctgcgcgtcggcttgaagccattgcaacgacaggaggcccgttttgcgggcctcctttttaacgcgcggctgccgggtttcggcatcgcgcttgcacgggccgtgcaagcgccctagatgcgctcttcgaggtcgatctgcatgaggtagacgttttcgcgcaggcgtttcgccgcgagacggctcaagcgcccggcgtcgtacatcgattggatttgctcgagttcgagcttgagtccggtttgctcgacggccgccgcatccgaaacgcgcttcgtgatggcggtcacgctcggacgcgaggcgcgcagggcggcaagcgtgcgctggtactcgagtatgagctcgctgacgtcttccgtgggcgcttcggggcttgccatctcctcgcgcagcttggtgacggcgtggttgcctgtggcgatttgcaggcttctgagttcctcggcgttttgggacgaggtcttcccgggaagtgcatgggtgatgcgctgccagatggcacgggagaacaggccgaatcggcgaatcgcgtttcttcttacccagctgtactcatggtgatgcttgatgaggttctgcacgtaggccaggtggttcatgtgttggtagccgataacggggtcgatatcgtttcggtcgatgagctccaaggtgtaatcttgctcccagcgcagcgctttgatgcgcaattccttgttcggttcgatttctatatcgttggtgtccttgatgcggttgatccgatcgttgtacgatcggatgattttttgggttgcgcgtctgttctcgggcgtttgcttggaggtgagctcctcgatgaccgcgcggtatatgtctatgacggcattcgcctcgtcttcatcgaggatggcggttcctttcgttttatcggctttcggggcgatgagcggaacgatgaacgtggcgatgagcagcgtgcatatgataacgcccgatgcgagaaagatgatgttggatcgatgggggaatgcgtttccgagatctccgatttgcgcaggtatcgtcatgacgagcgagagggtgatggcaccgcgtgcgcccgaaagcgtcatgatgagcagctcgcggaaattgagcttcccaagcgtttgccgggaaagctttcgcttgctttcaagcaggttcatgcagacgagccagatgaatctcaggagatggagcgcgaccgttatgaggaggatccagacgatcagttcctggttgctcggaacggggttgttccaggcgttgcgcatttggtcgggaagctgtgcgcccaacagcacgaacaccacgccgttcagcgtaaacgaaaggactttccatacgctgcttgaaacgatgttgagtcgggatacctggggatccattgtccggggcgagatgatgccgatgaggcctgcggccacgacggcgaggatgccgctcgttccgaactcgttggctacgaggtagacgatgaacggcgtgaacacttcgaagagcacgtgaaacgtcgtgttctcgaggccgagggagcggaccctgcggatgatgaagtttgcgagatatcccagcacgatgccgatgaggatgccgccgaaaaagctgaagaggaagctgaccgaagcgtcgagcagtgaaaacgcgccggttacaacagctgccagagcgaactggaatgagacgatgcccgatgcgtcgttgatgagcgactccgcttcgaggacgtttttctgctgccgtttgatgttgatgtctttggaaagcgaggcgacggcgaccgcgtcggtggggccgagtgccgcgccgagcgcgaatgcggccataagcggcatcgagggaatgagccagtgtacgtaaaagccgacggcgagcgccgcgacaagcacgaggccgatggcgagtgagatgacgggtctgcggttcttccataaggcggttttgtcgatgcttttcgactcgtcgtagatgagcggaacgatgaacaagacgatgaacaggttggcgtctatgtcgatctggatggtcgactcggacagaagcgcgattatcacgccgaggccgatttggatgaggggcgaggaaacttttggaacaacctgatcgataacggaagatagaaggacagcggcgagaatcaataatcctaactgcactgcttccacgtgtcattcgctccaatcgttgtgcgctttgcgcatgccgcgttcgttcaggcggccgcatgccatgcggtcgggattcgacgctcatctgcaaagggagttgtcactatcgatagtattctaccgtagcggtgggcgaatcggcggcgggaaggtgaagtttcgcagaaggatctcacgcgcacctgcctgcgggacgctgcggctttcgcctaatcggtctgcgggcatggctcaaaacgggtagaatactgaaaacatcgtttcttggaagccttcggtcgaccgaaggcccttgcgatccgaacggcttcgatatcaggaggtttcatggtgcacctgggcaaaacgttgctggtggcgaaccctgtctcccagaacggcaatggtgcggttgccgcccaccgtgcaggcgaagcgctgcgcagcaggctcggggaggatcgcttcgacctcgtgatgaccgaggcgcctgctcatgggaaacgcattgccgaagagtcggccggctacgatacggtcgtagcgctggggggagatgggctgattcacgaggtggtgaatgggctcatgtcgatcggcgaagcggagcggcccgctttgggagtgcttcccatgggatcgggaaacgattacgcgaggacgctcggcctgtcgttcgacctcgagcgctctctgaagcagctcgaatctgcgcgtccgcgccttttcgatctcggtttgtgcaacggagaatacttcgccgaaacgctttctttcgggcttgacgccgccatcgccctcgatacggtcgagcggaggaagcgaacggggaagacggggacgccgctttttctggcaagcggcatcgatatgcttctgcatcatatcaaggagtatcgtttcaccgcgagccttgatgggggagagccgttcgagagcagcatgctgttgttcgccgttcaggttgggccgacttacgggggaggattcaggatctgtcctgaggcgaagacggatgacgcgctgcttgatttatgcatagctcatccgcccctcggcataccgaaggcggttttcatatttcttcttgcgaaagacgcccaccatacgggattcaagcagctcgaattcaagcgggcgtcgatgctccgcatcgagtttgacgaacagcctccggcccagatagacggggaaccgattccgtcgcttacctacgatgtgtcggtcgccgcacatgcgttgcgcgtgcttgtgccgtaaaacccgtgcagggcgccttaggaggttgcagactgctctatggcctgcaggctcgctttgatgtagagggtgtaggcgacggctgccgtcgatgccttgacaagatctctttcgaaatctccctgacctgaggacccggttaagccgcaggggctttcgccggtgcctccgaacagcgctttgacggcgtcttcgaacgcatcgcagtagtagtcgtaggcgatgtccgtttcgaagctggcgatttgcgaggcgatgagcttttcgatttccgcgatcgaaaacgtttgtttgagcgtgcagatgacgatgagataagctatgtggctgcgcgtgtattttttcgagcgggctgccgccaagacgccttgcttgacgtagttgttcaccatcgacgaagtgatgatcttctcgctgtcgggatagaggggctcgagggtttcctcgagatagccgagcagctgatccatgtacagttcgatgcgggggatttcgccgtaccgtggaagggtgaaatctttgagttttgcggcgtattgcgtgtgtgctaccgatgccataaagcgctttccttttctttcgtgcagacgacgagcataccaagcaatccgtattcagtcaattacgagaaacccttgacaggtattcgatcagtacgtaatctagttttaataaccagatcatgtagcaataaaaataagtaggtaggatgatgaaaaatactgagatcgccttgataatcgattcgtgcacggatgttcctgaggatctcatcgaatcgtacggcatgtacgtcgttccgctgaccgtcaactaccgcgatgggagctaccttgacaaggtgaccatcacgcctcagcaggtgtacgatcggtttgcggaggaaatccccacgacttcgaccccgtcgcccgcttcggccaaggaagtgttcgaacgggttgtggccgacggattcagcaaagcggttgtcgtgacgatatcgagcgggctttctgcgacctacgagcttctgtgctcgaccgccggggaatatccggaacttgacaccgtcgtggtggataccaagaatatcggcatgggggcggggctctcggccatacgggcggcgaagctcatcgaagaaggggtccctttcgaggaaatggccgggcgcatggctgacgtggtcgagaatacgaaggtgtacttttgcgttgatacccttgagtatctgcataaaggcggccgcatcggtttggtcacgttcgccgtgggcagtctcttggacatgcgtcccgtcatcagctgcaatgaggaaggcgtttactacaccgtatcgaaggcgcgtggccgcaagcaatctcttcgcaaggcgctttccgttgccgagaagttcgcggcgggcttctccgagtgcgcgatcgccgtcgtgaacggcgatgcggtcgatgaagccgaagaggtacttgccagcatggtggcggaggtgccgaaccattccgccgtctacgatgggcagatcagcccggttctcgtggtccataccggtcccggtctcattggcatcggggttcaggggatagcgtaaggcaatggattccgacgtccgcacgatggtgccgtacgcaaaaagcggcatgcgggcagggccctctttcgggcagcccacgtgcgcaaactgattttttatcagtatgggaattcggtcttgcgcagggaagtgaaaacccctatactaatcgcttgcgccttggtggctatagttcagttggctagaacgccagattgtggctctggaggtcgtcggttcgagtccgattagccaccccagcgcgttttttgaaaactgcttgcacgtttcccgagcttgcattacaataactcggcgcgattgtgcggttgaaaactttataaggaccgttagcttagttggtagagcaggggactcttaatcccaaggtcgaaggttcgaatccttcacggtccaccatgaaaatgcattggccggagactttcgtctccggcttttttcttatgaagcctacgaaagccttcctgttacagtacaaaggttttgatgtagccctcatcttcgacgatggcatcggtaacgcgtatgaacgccgcgatatcctcctccgaaataaggttggcgtagcgttgcttggccgcatccaggtgggcgttcacgcggcgcgtcagcgccttgccgtcatcggtgagctctatgcggagccgtcgcccgtcagcggggtcgtgttcggcgtgcacgcagccctgctcttcgagcagtgaaacgagcactctgacgttttgataggagcagcgcagatgatcggcgaattcgccgagcgtcggagcgctgtcgaaagacgaaagcgccgacagcatcataagctgccgtcccgtgtagggtccgatggaaacgcggttttcttcttcgacgctttcgtgcaactgttcgaagctgctgataagattgtcgatcatgcgattgccttcccccgaagttgtcttattgtatctcgctacagcggcgggtcggccaattgttagtaactggttaccaaaacgatgatttcgaactgagagggcctgcgggttttggcagaatgctcgaagatcagtttgactgggcgggatcggcgccgttcgggcgtccggcgcttcgctgcgcatccgatccgccttcgagattcgcgcggcatcggtgcgtttctgcgctacaggtattttctcgacggccgtcgtttgcgaggcttcttcggttcgcgaaaatcgagctcgatctgatcgccgcaaagctcgtcctttttctttttgagcttcacttcatcgataacccagctcacagcttccttgccgaagagttcgagcatttttatacgggcatcatgggcgtttttcttcgacgaggcacgatgttcgctttcgaattcgaagtagcctttcgtgggagactccgtgacgggcgaggtgtagtgcgcgatataggtttggacccccggctcttcgggggcagaaacggcaggggccgttttccctccgatgtcatcgggctcgagatcgaacagcgtgtcgatcatgtcgtccatccagatcctttccttctcgcgtcctcgaggttgctattgtatcagcaactcgctggttgccgtcctttttccgcaaagcttccgtgtgcggtgatatgtgattgatctggtgacggcttggcatccgttggttgaggcgggctgttcttgtttcgcccgcatggtaaggtatgcgcgagaaacgaatgcaggcacgagagaaagataccacaccatgaaaaagatccttatcggcgtcggcgccgtcgccttggtggtgctcggcttcgtcggagcccagatgtggaacaaggcgatggagccgagcgtatccctttcggctgcttcgattcaggagcagctctccgaatcgagcgagcttacgacgtcgaagctcgactaccgaggtcttgtccgctacgagaacggcgatatcgactttctgacgaagaagggcttcacgatggtctacgatgccgaggtgcgggccggcgtcgacctgtctcaggcgtcggtcgagctcaacggacggtcgattacggtgcaactgcccatggcggaggtgcaggcaatttccatcgatcccgattcgatcgagttctacgacgaggctttcgcgctgttcaattgggataacaagcaggatacgaccgaggcgctcgtgctcgccaagcaggatgccgagggcaaggtcgatcaggtgagcatgatcgaccaggcgaacaaccaggcgaagacggttgtcgagagccttctcaggccgtttacgcaaggcgagaacgcctatacgcttacggttgtacagcagtaggagcgagttttcctcgatgccccgatgcttgtgcgggcctggaaatcgaccccgagccgaagccggcatcggggtcgatttgcggttgcggccggcgggggcgattccgctacgccgagcgagcgaggcgccgtgcgcttgcatacgtgataaagaagtaagctccgtatacgatgaagaatgcaactgcgcacatgacggccatccggccgatgtcgaggtgtccgaaaacggctaccacatcggtgacgacggcgagtgcgcagaccgagtgcgcgatggcgagcatgagcgggaacgcgaagtagatggcgatctgggcgagcagggaacggtcgatcgtcccctcgggcgttccgagtttgcgaagcagcccgtagcggcgtgcattatcgcttgcttcggaaagctgctggatggcgaggatggctgcgcacgccatgacgagcacgaacccgatgtagacggccaagtaggcgatgacggtagagagtccgacgctctggtcgagcaccgactgatgcgtgagcgtcatcgaaagcggccaggtatcggcgatatcggtgtcttggatggcatcgcagattcgctcgaactcggcttccgcctcgtctgagacgcactgtacgtcgagcagcgaatagccgtgcatggcgcttgagggcatggcttcgtcggggatgacgagcgcgcctgtgttcatgggaaacggagtggtctcaaggtagcggtcgtcgaactgcgcaagggaaagcgaagcgtcgccgatttgaaaggacggggccgccttcaccagatcgcggtagtagtcggcgagcagatcggagtccgatatgatcgcgcaggtgccctcgtcaagtacgatggccggctttcccgcaagttcgagcgctctgttcgcctgcgaaagcgaaagcaggtagatggggtaggcgccgtagccttcgctgatcgcttggcctgcgtagtctttggcggttttgccaagagcggcatcgaggtcgtcgaatgtgatgctgttctcggcatccaccatgaaatcgatttgcgcagcgccttcgataagcgagccgatatcgccttcgccgagtgcgtcggcgctttcctcgagaccccgcagcatgtcgtagtctttcgatgcggcgaattcgccgaagctgccgaggtcctcggcgaggtagccgtcgttggcgttgtaatagccgaataccgtacgggccgttgcgctgtacgaagttgccttctcgatgcccgccgtcatcgtgttgcagatgccgatgccgccgcatacgcttgtgatggcaaggaaaagcgtgatgcagatcaccgacatcgaaagaaacgtcgtattcaccttgctgttgagctgccgcagggtgaacatgttgaggccacgcaggtaaacggggcggatgatctggatgaggcgaagaaggaaccccgaaagggaatagaagaacaggaccgtgccgatgcagacgagcgcggttgccgccgcaaattcaggcgagggttcgagcagtccgttttcgatcagcagcttgtaggagatgccgatgatgatgcaggagacgatgaagagcacgagcgagagcggaaggctgcgaagcttcatcacttcgtttctgctgtccgcgtgcaaaaggtcgatgagcttcgccttcatgatcgtgcgggagttcgccaacgctgcaatcaggaagatggccgcgaatacggcgagcgttttcagagccgctgccgccgagaagccgaatacgaaccccggcacgtcaaccgcgaacagcgatgcggtgaggtagaggagcgcctgcgagaaaagcgtgccgagcaacaggccgcccgcaagcgatgctgcgccgacgataagggtttcgagcgccgtgattttgatgacgtcagactggcgcatgcccaggcacagatacatcccgaattcttttttccttcttttgatgaggaagcggtccgcgtagatgacgaggaaggcgagtattgcgacgatgaacaccgaaacgccgtttatgacgatgcccaaaagctccatcatcttgttcgcagtcccgataaagctcatcgcttcctgatcggtgatggaattgaacgcgtagaaaaccgcaacgccgagcaaaatcgtgatgaagtacactccgaagtcgcggatggacttgcggacgtttccgaaggcgagcttagcatgcatcggattgatcgccccctatcttcgaagtgatggctacgatttcgccgaagaaatccttgcgatccttgtgtccgcgtttgagctggccccacagcttgccgtctttgatgaacacgatgcgcccgcagtagcttgcggtaaccggatcgtgcgtgaccataagcagggttgcgccgagctcgttgaggagttcgaacgtatcgaggagctgggccgccgatttggagtcgagcgcgccggtcggctcgtcggcaaggatgaggctcgggtgcccgacggtggcgcgcgctgcggcgacgcgctgtttctgcccgcctgagagctggtaggggtacttgttgagcgtatcgcttatggagagcttttcggcaacggcgcgcacccgcaagtcgatttcggatgcggcgactttctttatggtgagggaaagcgcgatgttctcgaaggcggtgagcgtatcgaggagattcgaatcttggaagacgaagccgagccgatcccgtcgaaacgccgaaagctcccgcgatccgagcttcgtcacgtcctgcccatcgatggcgatgtttcccgaggtgggcgagtcgatggtggcgatgcagttgagcagcgtgctcttgcccgatcccgacggacccatgatgccgacgaattctcccgcttcaacgaggaagctcacatcgtcgagcgcttgcgtcgacgattcctcgcgccgcgcgttcgatccgtatcgtttcgagaggttgcgaacctccagcaatccttggtgtgccattgcgatcccttctcatatgcccgtcgggcgccttgcattgcgggttctcaggttatcgggcgtgctttacggggtccttcgcgcatccttacatcttccttacttcgttttcaaccgctttcggtgcgggctgcgtcatggtttaatacgtacaaggaaggatgccatgcaaaacgaagacgcatatctcacgcgaaagcgcatcatgctcgtcgatgacgagcccggtctgctgcgcatgctcgaaaccattctttcccaggcgggcttcgatgccgtgatctcgttcggagatccccgcgaggcgcttgcgtactgcgaaagcgcctcagggcaggcgaacccggcgcatctgttcgtcctcgatgtcatgatgcccgggatggatggcttcgcgcttctgtcgagggtgcgcaagatcggctgctacgcgcgcactcccgctatgtttctcacggcgaaagacgagccccgcgacaggctttccggacttggcctcggcgccgacgactacatctcgaagccgtttcttccccaggagctcacccttcgcatcaaggccgttttgcgacgctgctacgcagacgagaatccgatgctcgaacttgctgcctgccgcgtcgacctctcgaatgccgaagtgctgcgcgaggacgggtcgagctgcatgctcactgccaaagaacacgagatactgagcgtgcttgcgcgcaatgcgggaaggatcgtgacgatcgattcgatttgcgatgcgtgctggggcacgacgttcggttacgagaactcgctcatggcccacatacggcgtctgcgcgagaagatcgaggccgatccctcgtcgcccgtatcgctggtaacggttaaggggcttggctacaagctcgtcgaaggcgaaagatcgtgaagagctttccgcgattcttcacgaagcagctgctgctgttcgccgcactggcgtttttcatcgtggtggtcgatcttgtgctgtacgttggaatcgccatgcacgaatcggacgtcaacttctccgaaccctccgtcgtcgtgaaaaccgtgtcggaggccctcgttgccgaagacggcggggaaagctacgcgttcggcggcgatgccgcgcagctgctcgacgagaaggacgcctgggccctgctcataggccccgatgggaatctgctgtggaagtacaaggcgcccgatgaagcggtcaaggattattcgcttaacgaagttgccctgttttcccactacggataccttgaagatcgaccttcgttcatatggtcgcgcgacgacgggctgctggtggtgggctttccggcatcgagctactccatgtactcgacgatggggtttccgcgcgaagccatcggccgggtgcccctctacgtgctgctcgtactctcggccgacctgctgattttcttcgtcgcctatctgatttcgaagcggcgtaccgtgaagagcatcgcgccgcttaccgatgccttagacgatctgtcttcgggccaggctgtgaaggtgaacttgggcggcgatctcaaagaggtgggcgagcgcatcaacgaagcatctgagatcattcggaaaaaagacagtgcccgcgatagctggatcagggggatctcccacgatatccgcacgccgctttcgatgatcaccggatacgccgacggcatcgccggcgatgcggaggtgccgaagcgcgttcgcgacgatgcggccatcatacgcgcgcagggcatgaagatcaaagatctggttctcgacctcaatgcggcgtcgcagctcgaatacgacatgcagcctttgaacgtcgaagaggttagggttgcgggcctgctgcgggaaatcatcgtcgagtatctgaacggcggcctgtcggagaaatacaccctcggtctttccatcgacgacaccgcccaggatctcgtgcttgtgggagatcgccggcttttgaagcgcgccgtgcagaacctcgttcaaaacgccatggtgcacaaccccgcgggctgcgcgatcgaagtcggtcttcatgcgaaatgggacggctccgccgaatactgctccatcacggtatccgatacggggcagggcatgtcggtgaacgatctcatcatgctgcagagcagaattctccaatcggcttcatcgtccccgaagcaggatgaggcggagccccatggtctcggtctcgtgcttgtggagaagatagtccgggcgcacggcggcatcatgcagctggcgggcgaccagggcgcgggccttgtcgcaaaactgtatctgcccatgcgtcatgggtagggagccggcaccgggcgctcatcggctgttttcgcgttttgattcaaaaaaacgaacggatgtttcacgtgaaacatccgttcgttgcagttacggtgaagatcgcaagccctagtcgaacgcttttgcttcctcggcggggtcgctcttttcgatgaaggcgcctgccttgtaggatctgccttctttgttccaggtgcggtattcggccgttgcggtgaacagcacgtcggaggaggagttgagtcccgtttcgcaggaatcctggatcacgccgatgatgaagccgatggccacgacctgcatggcgatgtcgtttccgatgccgaacagcgagcaggcaagcgggatgagcagaagcgatccgcccgcaacgcccgatgcgccgcaggccgacacggcggcgagcacgcagaggatgactgcggtcggaagatcgactgcgatgccgagcgtgttggccgcagccatggtcatgaccgcaatggtgacggcggcgcctgccatgttgatggttgcaccaagcgggatcgaaaccgagtagttgtctttgtcgagtccgagcttgcggcacagctccatgttgacggggatgttcgccgcggaactgcgagtgaagaacgccgtgatgcccgagtccttgaggcagcgcagcacgagcgggtaggggttcttgcggatgctcaaaaacacgatgagcgggtttgcgacgagtgcgatgaatatcatgcagccgacaagcacgagcagcagctggccgtattcggtgaatatttcgagtccgcttgtggagaccgaggtgtagacgaggccgagaatgccgaagggcgcgaagctgatgacccagcggacaacctgggagacggcgtcggagatgctcgtaaacacgcccttggtgctttcgcttgcgatgcgcaatgcgatgccgagcacggccgcccaagcgagaatgccgacgtagttggcgttgacgagcgcgttgaccgggttgtcgaccacgttcatgataacggtggtgagcacttcgccgatgccgcttggcgacgcctgctcaaccgcatcggtgagcgtgagcgtaagcggaaacagaaaacttgccgcaacggcgacgagcgcggcaacgagcgtgctgatagcgtagagcacgacgaccgtcttcatggacccatcggagcgtgcgtttgccagggcgctgatgacgaggaagaatacgagaatcggagctacggccttcagcgccgagacgaacagcgagccgagcagcgtgagcagttcgacgttgggaaagaacacgccgagcattgcgcctatgacaaggccgacgacgatgcgctttatcaagctgatgtcgttccattttctgaatagttctttcacgaacgaaacccctgtctcttcgaaatcgctttccatgcaggtctcgctgccaaatccagcggcgagaccgaaccatcatagcagaacgctcgggattcgacccctttgttcggtaagtgataccctaaagaaaacgtttgggtgcaatcaggcgtttctctgctttcagcgcccgatcggcgatcgctcggtgcgcgatctgcgtatccgtgatgttctgttgggaaacgctccgatgatttggtatcatatctagtcgcgccgcgagaagagggttatcgctcgttcggcgcgatcgcccacgtgcgggtgtggcggaattggcagacgcgccagatttaggttctggtggggaaacccgtgaaggttcaagtcctttcacccgcaccattttcgctttcccggtgttgttgccccgaaaattgggagtgtcgaggcgctgccagctgaattcgataaacaaaaacactttctctcaccgaagagatctcttattgcttagcacggagccatatgccgaaggaggcaacgaaacgtttagaggccttgcgtcgattgcccgcgcagggcgacgagccactattggttgatctttcttggagcttcccagttttgacactgagaaggttggtagtgcaatgcgtagaatgtggctgcatagtaagaaccgttaaaacgcccgaacggtatgcattgtaccttcctcgggtgttttgctttgctgttgatactctccttgtggctatgatgaaaaattgcttatcgactgccctgtatctgctgataggtttcgaatttacataacgccgcttagatcaacttgatttttcaggggagacagtcgtgccattctgcgcatcgggcggcagcggtgcggggcgcgccgacgagatccccatgcgctttgccccgagggcgtttcgtggcggccagccaagctgctgaacggcgcatccgaggccgctctgcgcagctggacccggggtttggatctgtggcaaggtggctcgccagcacccgtcgacggtatgtgcttcgttgcgaaacggtagccacccgcaggcttctgcggccgatgcgtcatggtatcatactgccagaaagatggcagcagagcccgaccggctctcatgaggacgcaaggaggcacgcatgatcgcaaggctgtaccgcatcatcccgttgatcgttctgcttgcactcgttgcgctcgtcgtgtacttcgtcgtgtcgtatcgttcgtcgcccaaccgtgccaaggaagtgctcatcaaatcgttcacctggttgacgggcatcctatcgggcttttttgcgatcgcgagcctgtacgcactcctcgaacggaattatttcgcactcgatatcgcggcaagcttccttgttgtgacgctcattgcgctcggcatcgtgctcgtgtgcaaagcagtgtttctcaagcatcatccgcaataccgaaagaagccgatgagaacggagaagaagcggcgtttgcggtagcgcgtgctttccgcgcgccttgctcattgtgttttcgttcctacgggaaaaccgacatgatgcgtcggctgatggtgcgtcgcgcctccccgacggcgtcgagaaaccgatcgatctgttcgggcgtattgtagaagcacgggctcaccctgcatgacatctcgatgccgaggcgccgatggaggggttgcgcgcaatgggagcctgaacggatggcgatgtttcgggcgtcgagcacgagcgctatgtcctgcgggtgggttccagcgactccgaacgcgacgaccccgcttcgatcgagcgtcgcataggggtttccgtagatccgaaccgaatctatcgagcgcatcccgtcgagaagccgcgtggtcagcgagcgctcgatctcctcgatttcttcgaatcctatccagttgaggtaatcgatggcggcggcaagccccacagctcccgcaacgtttggggtgcctgcctcgaagcgcttcggaccgctttcgaacgtcgagtgcagatcctgcaccgtgtctatcatttcgccgccgaggagaaacggcggcatcgattcgagcagatcggccttcgcgtaaagcacgccgattcccatcggcccatacattttgtgccctgagaacgccgcgaagtcaacatcgagttttcgaacgtcaagcgggcggtgagcgacgctttgcgtgcagtcgagcacgacgacggcgcccatgctgtgggcgagcgccgtgatcttctcgatgggaaacaccgtgccgagcacgttcgagatatgggcgatggcgacgagtttggttgccgggccgatcttatcttccatttcgccgtcgcgcaatctgccgttttcatcgggatagaggaagacgagcttcgcgccggttttctcgcagacgcgctgccaaacgacgagattgctgtggtgttccgagatcggcagcgcgatctcgtctccttcgctcagtcgttcgagggcatagcagacggcgacgaggttgagcgcttctgtggcgtttctcgtgaatacgatttcggaggcgtcggctcccacgaaatcagccacgatgtttctcgatccctcgtagagcctcgtcgacgcaacgcttgtgcggtatacgccgcgatacgggttcgcattgcagtcgcggtagtacccctcgaccgtttcgagaacggccgagggcttatgcgtggtggccgcattgtcgagataggcgagcgaaggaggcgtgcatccgggttcgccgtccaaggcgcataaagcggggaaatccttgtagtagcaagagttcatccgtctcacctgatctttcgtgggccacgttcgcgggtgtcgttattgcttgtcggcggaggcgacgaggtcggtcagctgcgcatagcgcatgtcgatcagccgcccgagcttctgcacctttccgtaataggcttcttcgagcgacgtatcgtgcgcgatggcgtcggcgagcacgggatcgcgcaggtcgtttctcacccaggcgacgagcttatccatgtcgaaccagctgatcgcccctttgccgcctgtcgaaagacccatgccggcggtcccgtagcgcaggaactgggcggcttccttcaggctgtaaatgtagatgtcccgattgcctgcggcggggttcatctcgatgccgatgaagtgctctccccagtccagttcgcgcaggatgtagcgggcttcttctattcccggaagcggaaacgaatagaggtcgaccacttccgagggcatggcgagcgtatcgtgtgccatggttcatcatcctttctgcagcgcgcctgccgcctcgagggcgtcggcgacgtttccaaggccgtaggattcgagcgtagcgcgggtcgggcagccggtcgagacgtcccacccctcgtgctcgtagaatcggtccttcacggtttcgaagcgctcgcggtcgagcgtgcggtccatgcaggtgccgtattcccatttcccgtcttcgaaaaccggaagcggataaggcgcgctcgtcgggagcgaatacacgaattcggcgaatttctcctgatcgcgatggcgtccctgcatgtgccagatggcgcggtcgagcgcgtagatcttcttgcccatctcaaggctctcttcgaacgtgatgtcgacgccggtgaccgccttgtacatgcgcggttcgaaatcgggcgtagcgggcgttggatcgccggttggagaagcgtattcgatgaggtggggccacagccagtcgcacatgcccatcgactgcacccagaagcgcccatagtgcctcatccacgctaccttttcgatggtcgcatcgctgtagatgccctcttcgctgtagtcgaagcacatcgggtcgtcgagggtcgtcgacgccgccagacggttgaccatctcttcggcggagatgagcggctcttctccgaccatgctgcagatcatgggcatccagtggacatgccagttgagcccgtgctcgttgacgtcgcgttcgctcatgatgctcgcgtagctccattccacttcgagcctcggatcgtagtggtagaagtagccccactgcggatacatgaacgtgccgttggcgctgtcctcttcccagcgtccccattttttgacggcgcgcatggagccttcggcaaggtcggcaccgatgtcttcgcggtaggcgatcgccttgatgaacgcttcggcgaactcccagctgccgaacttgtcgaagggaagattggattcgatttccttgcctggccccatgacgcccatcttgtagaggttgcggcagtacgagatgatgctcgtttcgaagccgttcatgccgagcttgttctgcagatcggctgcccgcacctggtctttgaggttgtctgccgacatgtagaacagcgacgccgcgcacatgatgccgtttccaatgccgtcgtcgaagttgtggcggcagttgcggaagcacccttggcatccgtaggggcgggagatcatgtcgcgcgcattccagtaaattccgttgaagccggggtggcgcgtgatgaagccgtataccgccgcatcggggttcggggtttcgagcacaggatcatcgacgttgtaggagaacttctgctggaattcgatgcgcagatcgatgagcgcggcggggtccgctacgggcacgctgcccgtgccgaggaagctgaccgccttgaggttcttcgcgccccatacggcgccgagtccgctttgcccggcgtggtgcccggcgtcatgggtgatggtggccgttcggccgaggttttcgccggtggggccgatgcacatgaccgcgggcttttgggtggtgcgtccgccgtcgcgggtcgtgccgactgtataccattcgccatcgggggtgcctccggttacgtaatcccagatgaattcctgcgtttgggcggtatcgaggccccagaggtcatcggcgttgcgaaactccacttctccgttgaccacgttgacccaggtcttttccgacgccgcgcccttgacgacgtaggcatcgtagccggcggctttgatcattccggcgatgcgtccgcccatgctcgagcgcgtgaaccattcgggttcggcgaacgagccgatgccctgtatctcgacgcgcgcggatgccgagggaaccggcgtgccggaaaacggatttgcgcacacggtgaccacgttgccttcgtcgaaaggcccgaccgtcttgtcttcgcaaaagtcccagaacagagccgatcccatgccgtgcccccctccccattgctggtagggctccgagctgatggtctcggcggtctggctggtcaaatctatgatgaggatctttccgacgaatcctccggttgcttgtgacattggtatcctccttgagctcggttattcctcggcggcggcttcatcggccgggacggcttttacgacggaagcggttggaaccgatatgctcggtttcacacgtcccgcatcgtcgatggggtagccgatgatcgcccagtgctcgttgcgcaggttgacgtcgtatccttcgtcggattggcgtgggatggcgtgggtgaacgagatcgcgcgcatggggcagacctcgatgcatgcctgcttgccgttcggaccgccttcctgatcccagtacggcgtgttcaggcacaggtcgcatttctgagcgcatctgtcctcgtagttccattgcacgcgcgagggcgtgaacggacatgcttcgatgcaccgctcgcagccgatgcatttgccttcggctaccatgcgcacgcccgtttcggggtcggcgtgcatggcgcctgtggggcaggcatcgacgcacgagggataagggcattggcggcattggttttgctgcacgtcgagcgggaagcacccgagcggattcttcgtcagctgcatgcgcgaaaggttcacgttggtgcgaccgctgtgcgcaagagagcacgcgagcatgcaggtttcgcaggcgccgcactttttggtgtctacgagcagatatccgctcgacgcctcgacggcgtagacctcgtcgcctacgaggaacgcggatacacctgcgccggcgagtatcgcgccgatgcccacgccgccgatagcggcaacgaaatcgcggcgcgtgacggtgcgtgcggcggttttttcctgtgcgccgccagtgttcttgtcagacatgttcgatcccttcttttcgtcctgcggcaagcggaacgctctggccgcccgtctcgtctttttcggcggcggtcgcctcgaccgcccctttcccttcaagctcttcgatccatgccgagtgctcgtgtctcgcatgttcgagcggcacgtagccggtgaacatggatttcagcgtcttccacgacacgggcagaacggcgccgaagaacacgtgggcgaggaagaacagcagcatgagcgccgccgagatatcgtgcgtccaggttacgacgttcatgaacccttcggggagcagcagcgcgtgggcgagcaccttcagaaggccgcttaccagcacggcaaccgttgcgatgatggcgagtatgaacgccatgcgctcgctttcgaagtacttcgcctccttcggatacgtgcacttcttcacgccaagcaggcttccgtagtggttgagcgtgtaggtgatggcgttcttcgtcggcatgtgctcgcggaaacgccagcgcgagatgatcgtgttgccaagccagtagaaggttccgaacaggaatagcagcgcgaatacgaagtgcacgttgaaccatgttgcggcagcatcgtcaccggtgacgaacgagggggagaacctcgttccgaggatgatgcccgacacaagcagcaacgccgtgcccactgcatgcgtccagtgcgatacgcgtgcgggcgcgtcgtgccttagtacccgtttgccccggatgaccggatcctgacgcttgctcaaacccgcaaccagcagccctaagaacggagctgcgaacacgagccaggtgaattggtcgaacaaaagcgtttcttgcatccctgctcctctcgtcttgcagtgcatgggagaaagtatagaaacaccagctcatagaaccaaaatggcaaaatgaacagaaatccgtctccggatgtcggctctgactcgccgacgtgttcaaaatgaatagcaaccgaggccttcgcaaacgagcggttccatatgcggcgtaagcgtgcgttgcggggtcatctcggatctctggatggagcaccgaaggcgacttttcgctgcgagaaccgagacgagtgcacgtttccgctcggcggtcggcgcgtttcggtcgcccgagggtacgcgccgcagcgtcccgagcgccgcttgccgtcgaaaatcatccgatgaatacgtgagcggttttgtagggattgcgaaccttgcgaaccttgcgcgtgcggctcggcgaggggtgcgatggcgggccgacgccgttgggcgaaggagctgcgccgcgccctacaggttgcgcgacagctcgtcgatgcgcgcgtcggctacgaagacgaacgctttgccgcggtgctcggatcgcagataccccgcatcggcgagttcgacgaggtccctgcgtgccgttgcgtacgagatgcggttcttctcctgatggtatctgatgtggaactcggcaagcggagtccgtagcgctcgcgcgaggatggagcgttgccggtggttgaagcgctgatcgagcgagagcatggccttcgccgcccgatcttttcctgcgattcccgtgatctgctcttcgatttcgtcgagtgcgatcttgatgcattggcccgaaagcgtgtggtgcacggtgagatcgcagcagctgcgcctgcgggtgctttcgtattcatcggggccgcagagcgttttgtcgccgagctcgttttccgtccagaggtacttggcgcccgagatgggcgcgtacgccaaaacgggcaggccgtgtttgagatagaagagcttcgacgcgagcgaggcgatatgggagcttgcgaacccgtagggctggtggtatcggatggagtcggctatgagatttccccgcaaaacggcgaggtcttcgccgtcgccgccgttggcgtattcgaggatgagcgaaagctgccgtagcacgacgccccatgcctcctcgtcgatcgccgcgttcggcgcgttggcctgcagggcatccaaatcgccttgggcgatgccctcgatcaggcgggcatgaaagccgtcgagcatttctgcggagaacggctggtcgataagggaggaaagctcggagtcgatggcgacggcgtttgcgatcagccgttcgataggaagttcgggaaccgtgttgagcctgacgtgcatttcgagatggtcgcattgcactgcaaacccggcgagcttcgccgccgcaacgctttcggcaaggcgcatgccgagtgcgaacgatcgatcggcgtgatcgagcagggcttcgtagagaggggagtcctgcgtgctccgccgttcgatggaatcgatgaggtcgctcagctcgtgggttctgcggtaccacaggaggttgccctcttcgtcggggaagaggtgcacgcccagacaggtgccgatgctcccgagcatctcccaaacggagagcgggctcatgttcggggggagggggtgctgtaaaaacgtatcccacgtcatcgcttcgcgctgcgaaaggcgaagcagcgctcgaaagctgcgatcatgaatgatctcggtcaatgtcggtgcgtgttcgtccaatatccttccaaccccgcatcggcgatgcgacatgcgaagagcgctcgccgaatccatgcaagaagatccatccatgcaagagagcccatgtaagaaattactatagggtttcgaaaaggtcgcacctgcgcgaattaggcggaaggccggaaagcggcgagtgcggttgtcgggttgccgcataccgccgcaggggtattccggtaaccgcttgttatccaaatcgtcagtttgatgtgttcgtgcgtgttcgttctttctcattctatgcatatgtgcgataattccgtttcggtatgctttaagacgcgggattccgcgtttcacgtgggatgctgcggagctcgattcgaggccgcagagccgggtgagcacagcgcggcaaaccgcgttatatgccgcaaggcagcaactgaagatggaaggaaaacatacgtggaaacaaaagtcgaggcattgcaggacaaccaggtcaagctgaccgtcacggtcgatgccaaagaggttgacgatcgaatcaagaaaacctataaggatttcgcttacaagtacaatttcccgggctttcgtcgcggcaaggctccgcgtccggtcatcgacaacgctctcggtgccgaggccgttccggcgacggtcaccgatgcgcttttgaacgagacgtacccggttgccgttgacgaggctttgctgtatcccgtatcgcagcccaagttcgaggacgattcttcgctcgtcgaggccggcaagcccttcaccttcactgctgttgtttcggtgaaacccgagttcgagctttcgagctacgatccggtcgagatcgagcttcccgccgaaggcgcttctgacgacgaggtcgccgagcagatcgatcagctgcgcgagcactactattcgtttgaggatgacgccgcgtccgcgaagatcgaagagggcggttacgccgacctcaagatggaggcgaccggcgccgacggcgaaacgctcgagacgctgacgacggattcccgcctgtacggccttggcgtgggattgttccccgaggcgttcgataaggaactcctcggcttgaagaaaggtcagaagaaaagcttcgacatcgacatcaccaaagattcctcgatgatgacttcgtcgcttgccgacaagaccgataagatccatttcgacatcgaagtgcttgccgtcaagaagaagatcctccccgaggtgaccgaccagtgggccaaagacacgctcggcttcgaggatgtggcggatctgaaagcccgcatcgccgaatcgatcgccaagcagaaggccgacgtgcttcccggtatgaaggaaaacgcgtgcctgaacgtgctcgccgagcgccttgaaggcgatgtgcccgagtcgatggtagaggccaacgaggccgatcttctcaagtcgttcttccagcagctccagtcgcagggcatgagcttcgatgtgtacctcatgcagcagggcatcaccgccgaccagttcaaagaagacgtgaagaagcagtcttccgacattgcgaagcaggatctcgcccttgacgcgtgggcccgtcatcagaagatggaggtcaccgacgaggagatgtccgacgagttcgtcaagagcggcgtcgaggatcccgaggcgctcgaggccgagtggcgtgccaacggccagatgcacatgctgcgccagggcatccttcgcacccgtgccgtcaacgagatcatggagaccgccaaggtcaccgaactgaccggcgcaaaggacgaaaagaaggacgagaagaagcctgccaagaaagcgtcggccaagaaggccgctgcgaagaaggacgaggccgacggtgcggaggccgaggagaagaaggctccggcgaagaaaaaggctcccgccaagaaggctgctgagaaaaaggccgacgccgaagaagcgaaagagtaaagcatacctggtcaaggaattagcatacgagtcagacgggaacgccccgtcggaaacgaggcatgtatgacagcacaaaacgaaatcgccaaagcagcgctcatcccctacgttatcgagcaatcgccgcgtggggagcgcagctacgacatctactcccgactgctcaacgatcgcatcatcttcctcggcgagcagatcgacgacaatgtggcgaactccgtggtcgcccagatgcttcatctggccaactccgacccggacaaggacatctccctctacatcaattcgcctggaggatcggttacggccggccttgcgatcctcgatacgatgaacttcatcaagtgcgacgtatcgaccatctgcctgggcgaatgcgcttcgatggcagccgtgttgctgtctgcgggcgcgaagggcaagagattgtgccttcccaactccatggtgctcatccaccagccttcgggcggagcccagggccagcagaccgagatcgccatcgtggcggacttcatgctgaagacccgcaagcgcctgaataagattctcgccgacaatacgggtcagtcgcttgagacgatccaaaacgatacggaacgcgataactacatgaccgccgaagaggccatggcctacggtcttgtcgacgatatcgtgaagccccaggcgttcgtcggtgacgacaagaaaagcgaagagtaatgccaaacgacagaattgacgggcgcgacgcgggtttcgggggagagcagaatccccgcgatatcgcatgtgctttctgcggcaaggcgccgcaccaggtctcggccatgatatcgggtcctggcggcatctatatctgcgacgagtgcatttcggtatgcgccgacgccatgatgcgcgacatgggtctcaacaacgggccgggggattacgattccccggctccggccgcttacggccgcggctcgggccgccatgcccgccaaggggaggcggaacccgttgtcatcgagcccgatcccgaagacatcctggcggatcttcccaccccccacgagctctacgaagagctttccgagcatgttgtgggccaggaaacggccaagcgcgcgctttccgttgccgtatacaaccactacaagcgcatcagcctcgacgaggacctcgatgacgacgatgtggaaatagccaagagcaacatcctgcttttaggtcccaccggctcgggcaagactctgttggctcaaacgctcgcacgtacgctccaggtgccgttcgccatcgccgatgcgacaacgctcaccgaagcgggctacgtgggagaagatgtcgaaaacatccttttgaagctcatcacggctgccgacttcgatgtatcgcgcgccgagatcggcattatctacatcgacgagatcgacaagatcgcgcgcaaggccgaaaacctttcgatcacgcgcgacgtttcgggcgaaggcgtccagcaggcgctcttgaaaatcgtcgagggtaccgaggcaagcgtgcctccgcaaggcggccgcaagcatccccagcaggagctcatccacatcgataccacgaacatcctgttcatattaggtggtgcgttcgtggggctttccgacatcatcggccagcgcgtcggcaagacgggccttggcttcaacgccgagccgccgaagaccaagaagctcgccgaggcggaactgcttgcaaaggtgctgcccgaggatctgaacaagtacggcatgatccccgaattcgtgggccgcatcccagtgataacgtcgcttcaggagttgtctgaagacgatctggtgcgcatcctcaccgagccaaagaacgcgctggtgaagcagtacacgcgcatgttcgagttcgaggaagcggagctcgcgttcgagcccgacgctctgcgcgccatcgcgcgcgaggcggtcgaacacggaacgggtgcccgcggccttcgctccattctcgagcgcgtgctgctcgatgtcatgtacgatctccccgaacaggggggtgcttcgcgcgtcgtcgttcgtgcgagcgatatagcgggggataccaagcccgaaatcgaagcagtcaaggtatcgaaacgcaaatccaagcagagcgcctaactcaacaagcggaaatcgggcgggcgcggctataggctttgcgcccgtcttttgcattcagggaacgaggagctatgtccgaagagaagaacaacgagcaggcgaagaggaaagtcgattacgacttcgccgcccacgagcgcccccttatcgaggcttggcaggagaaggggtactttaagagaacgccgggtttcggcgaacatgccgatgacacctacacgatcgtcatcccgcctccgaacatcacaggtgcgctccacatgggccatgccctaaacgacacgatccaggatacctgcatccgccgcgcgcgcatgcagggatatcggaccaggtggattctcggtaccgaccatgcgggcatcgccacgcagaccaaggtcgataagaagctcgccgacgagggcatttcgcgccttgaaatcggccgggaggcgttcgtcgaggcgtgttacgactggtatcgcgaatacggcgccaccatcgtcaaccagatcaagggcatgggctgttcgtgcgattactccgatgagcatttcaccctcgagccggcttatgtgaaggcggttcgccaggtgttcgtcgattggtatcacaacgatctgatctatcgcggcaagcgcatcgtaaactggtgcccgcactgcacgaccgccatcgccgatgacgaagcggagtacgtggacgaagctggccacctgtggtacctgcgctacccgcttgtcgaaccggttgacgggatggactatatcgtggtggcgaccacgcgccctgaaaccatgctcggcgatacgggcgtggcggtaagtcccaaagacgcgtcgaagaaggcgctcgtcggcaagacggtgaagcttccgatcgtcgatcgggaaattcccatcttcagcgatttccatgtcgatcccgagttcggcaccggattcgtgaaagtgacgcctgcgcacgatcccaacgattacgcgatgggcgagcgcaacgggcttgcacgcatcaacatcttcgacgagcatgccgtcgtagttgaaggctacggcgagttttccggtatgacacgcgacgaggcccgcgaggccgtggtggcgcgtttcgaggagctggggcttctcgatcatgtggaagagcacggccattcggtcatgacgtgctaccgatgccacaccaagctcgaaccctggctttccgagcagtggttcgtggccgtcgacggcctcaaggacgcttcctcccgcgtggtcgaggacggttcggtcacgttctaccccgagcgttggaagcaggtctatctcagctggatggaaaacctcaaagactggtgcatctcgcgccagctgtggtggggccatcgcattccgatgttctactgcgacgaatgcggctgggaggatgcaagcgtcgaggacgtcgaggcgtgccccgtgtgcggcgcgcacgtgcgccaagacgaagacgtgctcgacacgtggttctcgtcgcagctgtggcccttcgccacgatgggctggcccgaagccgggatggatgcgcccgagatcaagctcgcctatcccacgcaagtgctttcgacggcccgcgatatcatgggcctgtgggtggcgcgcatggtcatggcttcgacgtacttctgcaaggagatcccgtttcatgatgtgatcattcatccgactgtcatggcggccgacggcaagccgatgagcaaatcgcgcggcaacggcgtcgatcctttgcggctcatggaagactacggtgccgatggcatgcggttcggcctgctcatgcaggtgaccggcgcacaggatctcaaattcaacgaagcgaagctcgaaagcagccgcaatttcgcaaacaagatccgcaatgcggcgcgcttcgtgatgatgaacctcgacggctacgagccgggtgcccccgatcccgtgacgcctgctgacaagtggatattctcacgtctggcggggctggtggcccgtatcgacgggatgttcgagcgctacgagttcggcgagatcacccgcgagttgtacgcgtttttctggaacgagttctgcgattggtacattgagttttccaagagccgccttgcgggcgatgcggccgaccgcgcgatctgccagcgcaacctcgtgttcgtgctcgacaccgcgctacggttgctccatcccatcatgccgttcgtgaccgaggagatctaccaggatctgcctatcgacaaggcggatgcgccgtacctgatcatagcctcgtggccggaagccagcgagcttgcccgttacgtcgacgcggatgctgagcgtgcgattacgatggtgaccgaggcggtgtcgggcattcgttcgacgcgctcgcgctacggcatctctccgaaaacggagctcagcgtcgtcatcaaagccgatgcccacgatgtcgatctgctcgaagcccagcgccagctggtcatcgacatggcgaacctctccgggcttacgatcgcatcggatgcggaaaagccagccgagtcgagcatcgcgcttgccgcgggcctcgaggtctacatcgtgctttcgggtctcgtcgatttcgctgcagagagggcgcgccttgagaaggagcgggcgaagctttcaggcgatgcggccaagctcgagaagaagctctcgaaccccgggttcctcgccaaggcggcccccgagatcatcgagaaggatcgtgcgaagtgcgccgagctgaccgacatgctcgctcgcatcgacgggcagctcgccgaaatagggtagagcccattctgggcgtttgagccgggcggggatgagcgggttcaacgaggcggctgcatcggaaacgggcagccgcctttcttttctgcgtgcagggacggtgcctgtttctattttccgaggaaattgggggtatctgctttgctcaggtatgttctttgttacaatagggcattgtgtcggcgcccggcgtcgatgcgaacgttttcatacgacgtcatatcgtacgtactgacctagaaaacgaggttaccatgaacgaactgttgtcccagctgtggacacctgagctgcaatcggctttcacgatcgtcgtcgtgctgctggttgtgctgtacgtgctgtccatcgtttgggtggtgcgcgacgcttacctgcgcggctccttctggtatatctgggcgatcgtcgccctcgtgccgttggtcggcgttatcgcatactgcctcttgcgcccgccgctgctccagatcgatcgcgacgagcaggagctcgagattgcgctgaaacagcgcgagctcatgaagtacggcgaatgcgctaactgcgggtatcccgtcgaggccgatttcgtcctgtgtccgaattgtcaccagaggctcaagaacctctgcatgacctgcaaccatgcgcttgatccgtcatggacggtctgtccgtactgcgccaccccggtggcggggggagcgccgcgccgcggagccatgcgtcctcgttcgggcgcgacaactaccacgccgcataacgcggctccccagcaagcgaggccggctcgctcacgttcgcgctcagccgacgagctcagcgcacagtaaccgaaactgtatgcaacgcgaagccgccctcattggcggcttcgttgttcatagggccttgcaaaggctcgaaaacgatcgtgcaggtgctttgtgcgcacccggcacagagaaaggattggatatggaaatcattttgcccgacggttcagcgaaggaactcgagagcggggcgacggtcgccgatgtggcggcgtcgattggagcgggccttgcgaaagcggctctggccggcatcgtcgatggggttgccgtcgatctgggttgcgaggtccacgggggagagcaggtggccatcgtcaccagcaagacccctgaagccatcgacatcctcaggcattcgacggcgcatgtcatggctgccgcgcttgtcgatctgtacggcgatgtcgagttcggcgtggggcctgcgatcgagggcggtttctactacgatatcaagatggagaagagccttggtcccgacgatcttgagaagatcgaggcccgcatggccgagatcgtcgcggcggccgaacccttcgagcgccgcgtggtgacgcgagccgaagccgaggacatcttctccgaccagccgttcaagctcgagctgatcgccgagcttcccgaagacgagacgatcacaacctattcgatcggtaagtttaccgatctgtgccgtgggccgcatctgcccgacacctcgaagatccctgcgttcaagctcacgaagcttgcgggagcttattggcgcggcgattccgaacgcgagatgctgcagcgcgtgtacggaacggcgttcttctcgaaaaaagatctcgaaacgcacctttcgaacctcgaggaagccgaaaagcgtgaccatcgcaaactcgggcgcgagcttggcatctacaccatggatccgcttgcaggcgtcggactgccgttgtatctgcccaagggcgcgcgcatcatccgcacgatgcaggaatggctgcgccgcgatctgtacgaacgcggctacgaagaggtcatcacgccgcacatctacaatgccgacgtgtggaagatgtcgggtcactatgacttctaccacgagaacatgtacttcttcgagatcaacgaaggcgacgaagagaatccgcgcatgagcgagtacggcgtgaagcccatgaactgccctggccatgtcatgctgtacaaggccgacctgcattcgtatcgcgatctgccgcttcgttatttcgagttcggcacggtgtaccgccacgagatgagcggtgttgtgcacggccttctgcgcgcccgcggcttcacgcaggacgatgcgcatgtgttctgcacgaaggatcaggttgtcgacgaggtggttgccatccttgatctggtggatcacatcatgacgacgttcggattcgagtacaccgccgagatttccacgcgtcccgaaaagagcatcggaaccgatgatatgtgggagcatgcgacgaactcgctcaaggaggcatgtgcgcgccatggcctcgaatacgagatcaacgagggcgacggtgcgttttacggtccgaagatcgatatcaaggtaaaggatgccatcggacgcacgtggcagtgctcgaccgtgcaggttgatttcaacttccccgagcgcttcgagcttacctatcgcaccgaagataacaccgaagagcgcccttggatgctccatcgcgccatcttcggttcgatcgagcggttcctcggcatccttatcgagcactatgcgggctcgcttccgttgtggcttgcgcctgtgcaggttgcagtgctccccatcgccgaccgccacaaagatgcggcggccgatcttgttgagaagctcaaggcggccggcggccgtgtggaggtatacgatcagaacgagccgatgcgcgtgaagatagccaaggcccagagtcagaagatcccttacatggtcgtgcttggcgataaggaagtcgagaacggcacagtgagcgttcgcgagcgccatgaaggtgatttgggttcgtggagcgtccagaagctcgtcgacatcattgcggaggcggcgctgtagatttcttcttgccagggtaagcgctgggtgcgaaagccctgggtggtccgagacgttcgggcgcccggggcttttcgctgcgttcggcgtcgctttgcgcctgcgacccctcgggggaatgctgaagcgccttttctgcacgttttttgccagattcatacaagtcgcgcatgccccatgcggtcgctgacgagccgtgtcgcccagaagcgggttaagcagccttttgatctggggcgatgagggcggcagtgtatttggtgacatcttgaggggccgtcgggctttctgtggtgcgttcggttgtatgaatctggcaaaaaacgtgcatttcggggctttcggggcgacaacgccggctattgtcgacgtgcgccggccaccggcgacgtccgccggcccctggtgacgcgcgccagccaccagagtcatcgtcggctattggcggcatgcgcaggctgtcggcggcatcgccggccaccggacgcgctaaccagcggaggtgtcggcacctcggcggttgcgatgcgcgggcgtgtacctgcggcgcagccgcgctacccaagccagaagcgataagctgttgccgattcgcaatcccatgtggcgatgcagaactgcgaaaggtcgtaggccggggcttgatcggttgtgccgagggcgcctctggaaacgacgaaggggatcgtgcaggacttttcctcgccgggtgcaagcatgttccagcggtccttaagctgataggatttgaagtttccttctcggggttcgccgtacagctcagctaggatgcctcggtcgacctgccacccgcttccgataacgtcgacgctcgatccgtctatcccttcggtccagagggaaaacgagggcatgcgggtatccgcgtcggccttgttggcgagggttatatcgacgaggatgacgacgccgtccgctgccttcacgaaacctgagtagacctcggcatagtgcggataccattccgagaaggcctggaggcttacggcttttgcggatccgactttcatggagagggcggaacactcgtaggaccagtcgggttgtttggccttgtggcgtgcaagcgcccgctcgccttcatcgagttccccgaagtccgtgaagtgcttttctccctgcaagagattctcgagcaggtacggcgcgccgagaggcacatcgacgacgttttccgcctctacggtgctgtacgagatgaactcccatgatgtttccgagcgctcgggtgaagcttcgcgcggtgctgcggggaggtattttccgatcgcccagcctgcgacgagcgctcctgcaagcaagcagcagatgcccgcagcaatgcgtttcgttcgagcggttttttccatcgtctcacatcctcggtgcggtttcgttggctaaaccctagcatgtgcggcggaaaaacggcaatgatgatttatatcaccccgtttctcaggtattgcggctccgtgatttgctacgctggtttgcatcgaatacgatggatgtcctgacgccccgcgtttgggctgcaaaggcggagttcaagagcaaaggagcgaagagcgatgttcgacggcgcggcggcggtatccgttttgtgcctggcaggcctgttcgcgggattctgccttgccgtgtcgaatgcttttttctcgaagcgcccttcgcgcacccgttttcggatggcggctctctgggcggtttcgctggttttggcggcgctgttcgatcggatcgcatcggatgcgttcggcggtgcgggccttgtcaacgctgcagtgattgcggcgattttgacggcggctttgcttctgtcggtggctcttccccggtattgggagaacaaagacgtgcttgcagcggtggcgtacctgcagatgcatcgtaaagtgccaccgcctgaccagaccgagggctcacgggaagcgaggggggttggcgggggcgctcaggagacggatggtcgcgttcgggatgaccgcgcaacgtttggggcagtgacgatcgatcacgcgatggtgtgcgcgcttgccgcgcgcgaatacgaattgacgcggcgggaggaagagatcctgctgctgcttctcgggggaggaaagagcttcgctgcaatagcgggcgagctgttcatctcggacaacacggtcaagacccatgtgcgccatatctatcgcaagatgggggtcaaccgcaaagagggcctgagcgaaaaggttttcgaagctgccgagggagcggcgcgcttcgcctacgcttcgtccgatgcatccttgtccgaatgctccgtgccgtccttggtctctttacagtcaggatctccttcatcgcccgctccccaggagccgtagccgcggccgaagcgccgcccttcctccttgcggagcgcacggcgcgcttcgcgtgttgtgcggcggtccgatttgcgcgccgtgcgctccgattcgagctcggcgcgcttgtcgtcgttgagcttttcgaattcggcgagacgccgagcctgctcggcagcgaagagcattgccacgcggtcggcgtgcgctgcgcgggaggcggacgccttgcgggcaagctcgtctcgcttctcctcggctgcgttgcgcagcgccgtgcggctttgcagtgcggcggccttatcctgccaattgccgctctgctgcgcttcgacggtttggtcgccgacctttttgacggccgaccagcgcaggtcgccctcggttttgaggtgctcccacgccttgtccccgttgtgcttcgcagctgcccattcggcatcgccctggttctttatctcttcccagagggcggcatcgagctccgtcccctggatgagtgcattggcgcggtcgatatggccgttgggtatccatgactccatgggtccgcgtcctgtatggtgcgtgatgaaatcggcagctcgagcgcggccgaacgatgcggcgcgcatggcggcgtcctgtttggccagcatccgctcaagcgcaaggtggtcgcgcaggatactgccgatctcgcgcgggttcctgctgatttcctttactgccacgatgggctgcgcatcgacgacacggtaggtgatcgaagccaagaacggcatgaggaacacggtgatggccccagccgatacgagcaccgaagcggtgtcttgcggcatggctcccaccttgacggcgacgcttgttaccgcgacgatgatgggaagcgcggtggtgcagtacaaggccacggtcaggcggctgttaggcgacatgtcgcgggtgtccttgccggtcgagagcgcgatgaatatgggcacggcgcggatgagcagcagcatgaggataaagccgacgaggagcgccggctgcgtgaatacggctgcgaggttgatcttcgcacccgaggcgatgaagaagatgggaatcaggaaaccgtaggcgatgccgtcgagtttcatttcaagatcgtggttgccctcgggaatcacgtagcgcaaaacgaagccggctgcgaatgcgccgagcacgatgtcgagatcgaagatcgcggaaagcgccacgagcgccacgagcaaaagcacggtgacgcgcatggcggtttgcgccgtcgtgttggcgtttgccgtgaggaatttgaacacggcgccgccggccttctttgctttggcggagaaggaggccgcaagtacggcgatgccgacgaagacgacgaggatgagcactgtgagccattcggctcgcgacgagagcagaagcgccatggcgatgacgggtccgagttcgccgtaggtgccgtaggcaaggatcgattcgcctacgcgggtatccatgaggttgcgctccttgagtatgggaagcagcgtgccgagcgcagtggtggtgagggctatggcgaccgcaatgccgtcgacgtggctgactgaaaagtagggtgtgagccttacggcgagaaagcccaggcagagcgtgacgatccaggtggcgagcccccgtttgccctgcgaacccgtcagatgcttggggttgatctcgtatccggcaagcaggaacaggaaggcgagtccgagatcggagagcagctcgaccgagtcggtcatatcgatgaggccagccatgtagggacccatcagggcgcctgcaaccaaaaggaagacgacttcgggaataggttttccgggtatcaactgggcgatcatgggggagagcgccgcaacgagcgcgatgaaggcgagcgatatgagatcgacgggcatgaagcggggcctttctgatgaagacggcatctcggtaaacttcgggaaattatacacccccgagcaccctttcctgcgatcctccagatgactcgcgcatctgtgaagcggaaccgaagcatccatggatagccgcggtcatgccgcgcggtcccgatacttgtatcgcttggatgcagacggctgatgccgatggaaaccttgcgttcaagcggtagcatatagggttgacgacacgggaaaggacgcaacatgataatcaccaccacgcccgaagtagaaggctatgcggttaccggctactacggcatcgttttcggcgaggtaatcaccggcatcaacttcctccgcgatttcggcgcgggcatacgcaacatcgtgggcggtcgcagctcgggttacgaagaggagctcatgcaggcgcgcaccgaggctctccaggaactcgagcagcgcgcgcagggcatgggcgcccatgcggtcattggcgtcgatatcgattacgaagtgctcggtcagggaaacatgcttatggtaaccgcttcgggaacggccgttactctcgcggcgaagtaggatcatcgccgcctcccgttcggaaaggcgcgcacggtgcggataaagcgcatatgcggcacgatcgtcctcggcatggcttgcgcgatacgcgcggcgagcgtatcgggtccgtgcggttcgtccctggcttttccagcagcggcgtgaccgtcattgcgggcgatgccatatactgtacggacgatggtcggacggcctttgccgacgcgttcgacagggggttcgaaaatccatagcagcgagatggcaagaaccggaaggattgaccgatgggaaagccgagaatggcagaggataggatgtcgcgggcttcagccttgaagcggcgtgcctattttgcagtgaacgatccgctgcacggcggcctgcttgcccgtattttcggagcgttcgtcttcgcgcttatcatagccaatgcggttttggttttcgccgaggcccaggctggcttccccgcgtgggtctactctgcattctgggttttcggcgtcgtgtcgacggcgtgcttcggtatcgaatacgcggtgaggctctgggtttccgacctggcgcaccccgctctctccgccgctcgcgcccgggtacgctacgcgacgtctgtcatgggcataatcgatctgctggcgtttctccccggcatgatcgcgtggttcgtgccgatgacggcgcagatgttttcggggatacgcatcatccgccttgtgcggttgatcaagatctcgcgttacatgaagggcgttcgttcgatcggccgcgtgctcgccaagcgccgccacgaaatcgtagcggcctttatggttctcgcgttgttgaccgtgacggcgagcgtcctcatgttccaggttgaaaaccccgttcaacccgagaagttcgacagcgttttcacggggatgtactgggctatgaccaccatcacctccaccggctacggcgatctggtgccggtcacggctctcggccggttcatcggtttctgcacaatggtgctctccatcgcggttgtcgccattcccgcgggcattttctctgccggcttcgtcgcgcagttcaaggaagaggatgccgagtctgcaaagcaggcgaacgccgctggcggcgcatcggcggatgacgggtctttatccggcgacgcgacggtctctggcggtcttgacgaaggggatcctatctcagatcgtcgcccagataggccctgagcgcgggccatgcgcgagctgcggtttcgtatccctgttcgtagagcgcaaacagcttatcgggatccttctccatgctgccgatcgtcacgggctcgggtggccggatgaggaatacgctgccttcatcgtgcattctcgaaagagcgcggtaaaggcggttgtattcgaaatggcggaaacgcatgcgatcgacgaagtgggggtactcgctgtactgtcgggcggcgagcgcctgcagcttgttgggttctttcgtgtatccttcgtgctgcgtgagcacgacgatgtgctttttcgttccggtaagcagggagtagaggatgggcacgctgtcgcaagggccgccgtcgagcagcttcttgccatcgtgctcgacgatcttgctgacgagcggcatggccgacgatgcgataagatagggaatatcggctctcggatcagtgaacgtatgatagtcggcctcgcccgtttcgaggttgcttgcaacggtggtaagcatcatgggcgagtttttgaaggcatcgtagttgaacggctcgagttcgttggggatcgtatcgaacgtgaattcgaccccgaaggcgtttcccgtgcgcacgaagctcttcatggaaaggtagcgccagtcgttgcagtatttggtgttgaggtagcaggttcgcccgtcttcgccggcaacgtagttgtagccgttgagcgcgccggccgatgtgccgatcacgtggtgcgcccagaatcgctgatccatgaaaaagtcgagcacgcctgcggtgaactggccgcgcatcgcgccgccctccaaaacgaggttgaccggcgatgcctcgcaaccgatgtaggacggttcgtgaagaccggactcatggactcgctgctcaggtgtgggcttggatgtttcttgcatgctgtggttcccttctgtcagatcgatagtataccgcttcttaccgttcgtcggaaaaacgtcgatttgtttcctaaatggcaacactagtgcctcgagggattgcgaacggttacaatggtttcattacaagatgagcatgcaggttagcatgcgggcgggaacgaaagacccgcgcagttttctaggaggttgtcatgagcgaggtaattagttcggctgagttccagagcaaggtgctcgacgagaagcagccggttttggttgacttcttcgcaacgtggtgcggtccgtgcagaatgctcgctccgacgcttcaagaagtcgccgaggagatggagggcaaagccaaggtgtataagctcgacatcgatcagagccccgagatcgcttcccgctacggcgttatgagcgttcccacgttgattttgttcgagggcggccagatcaagaagcagacggtcggagctcagcccaaggcgcagatcatggcgatgtttgattaatcttaaacgggcattcctgcaacgcgaaggccggcgcacgatgcgccggccttttttgtgccgagaagctaagttgcaccaggaggctaagcgcttttgcttgcgggtttgcgctcttcggcttcgaaatcgtcgaagacggatacgaggtagccgtagccttgctcttcaagtttttcgtagggaacgaagcgcagtgcggcgctgttgatgcagtagcgaagcccgcccgcttctgcggggccgtcgggaaacacgtgaccgaggtgggcgtcgcccgcacggctgcgaatttcggttcgcagcgtgttgaagctcgtatccatatgctctgtgagcacctcttttgcgatagggtgcgtgaagctcggccatccgcaacccgattcgaacttgtcgatcgaggagaacaacggctctcctgtggtgatgtcgacgtagatgcccttatcgaacaggtgggcgtattccccggtaaaggggcgctccgtctcgctttcctgcgtgacgcggtatgcgagcggcgtgagcgtgcgacgcagctcggcgtcgtcgggcttgggataggcggaggcatcgatgcagccgtcggcgttcgcatcgccctcgtcgggatcgggtatctgagcggaatcggcgggatcggcatcgttcccgaatgcttcgaggtagaaatccgggggtagcgcgatgctgctgccgagccccttgcgtttggcgaactcgtcggctgcccgcacgttgatgtggcaatagccgccgggattcttttcgaggtaatcctgatggtattcttctgcggggtagaaaccgtcgatcggctcgacctcgacggctatcggcttgtcgtagcgttcctgcaattcgcgcatggcgttttcgatgatgccgacgtcgcccatgtctgagtagtagatgcccgagcggtactgggtgcccgtatcgttgccctgccgatcgacggttgtgggatcgatggcctcgaaaaacgcctcgagcaaggttgccgttggcaggatcgttcgatcataggccatggcgaccgcttccgcatgccccgtgttgtattggcatacgtcgcgatacgatggatactccgtcgatccgttggcgtaaccgacttgggtttcgatgactccgggcagacgcttgaggtacgcttcgaggccccagaagcagcctcctgccaagaacagcatatgacggtcggctggcggatcggcctcgttggctttgtcggttgctcgttcgaacaccatgtgaactccttttcgcggtttcatgattctatctaaaccgtcttcgggcctcgtggcgagaaccgttacctttgcgttgcgggccgtgcatccattcacctgaaccgttactcgttcgttgaggtcgcaggttggcaaaccccaccgaaacagggtaaggtatacgcaaaccaacagcgtgcacgggatagtctgcaaaggagcgtatctgatatggaaacggaagctcaggataaggtgttcgacgttgcggtaatcgggtcgggtcctgcagggatgacggcggctctgtacgccgcgcgggccggactcgacgttgccgttttcgagcgcatcacgccgggcggacagctcggtcagaccgagcatatcgaaaactaccccggtttccccgacggcatcaacggcttcgatttggccttctccatgaagcagcaggccgatcggttcggcgcgcagaacatcggcgaggaagttctctcggttgatttcgaagcgtctcccaaggttttgaacacggggttcggtacctatcgggcgaaaagcgtcatcgtggcgacgggcgcgaagccgcgaaagctcgggctcgatcttgaagaagagcttcaaggccgcggcatctcgtactgcgctacgtgcgatggcaatttcttcaaggatcgcgatgtggtcatcgtgggcgggggaaacaccgcagtggccgatgctatctacatggcccgcatcgcgcgcaaagtgtatctcgttcaccgtcgcgatacgctacgagcgacggcgatctaccacaaaatgctcgaggacatcgatgcggtcgaattcgtttggaattcgggcgtcaaagagcttctggccaaagacggcatgctcggcggcgtgcttgtagagcactacgatacgggcgaggtcgaagaaatcaactgctcgggactgttcgtggccgtcggcaccgagcccaacacggagttcttgggcggtgcgcttgcgcttgacgggggatacatcgttgccgacgagtcggggcatacctccgtcgatggcgtgttcgcggcgggcgatgtgcgcacgaaagcgctcaggcaggtgactacggcggtttccgatggtgcgaatactgcggagggtgctgcggaatacctggcttcgtgataccatattcagttgcgatttaagcccggcaagccgggatttccgtgtgtgcgggttctgaaaacccgcgtcgagagaccgtgcgcgaacccaaagaggaataccgatgatagaaaagcttgaaaagataatcgaggcatacgaagacctgcagacaaggctcggcgatcctgccgtgctcgccgatcaaaaggaatacaaccgccttgcgaaggaattttcgaaccaggggccgcttgccgcgaaggcccgcgaattcgtgcaggcgagcgaagatctggcggcagcgaaggacatgctctccgatcccgatatgaaggaattcgcgcaggaggagatcgctggcatcgaggcgaggcttccgcagctcgaagaggatatcaagttcatgctcattcccgccgatccggccgacgacaaggacatcatcgtcgagattcgcgctggagcaggtggcgatgaggcggcgatcttcgcaggggacctctacaagatgtacgagcggttcgcaggcgagcagggatggaagaccgagacgctcgacatatcggcttcggaggccggcggctacaaggagatccagttcaaggtgaagggcgataaagtgtattcggtcatgaagttcgagagcggcgtgcaccgcgtgcagcgcgttcccaagaccgaaagccagggacgcattcatacttccacggctaccgtggccgtgcttcccgaagccgacgaggtcgaagtggacatcaaccaaaacgatctgcgcatcgacgtgtaccgtgcgggcggcccgggcggccaatgcgtcaacaccaccgattcggccgtgcgcatcacgcacattccctcgggactcgtggtgcagtctcaggatcagaaaagccagctgcaaaacaagatagccgccatgagcgttctgcgcgcacgcctgtacgagaaaatgctcgccgaacagcaggcggccgaaggagccgagcgccgcagccagatcggcacaggggaccgctccgagaagatccgcacctacaacgggccgcaggaccgcgtgaccgatcaccgcatcggctacaacggcacctacaacggcgtgcttctgggtgcgggcggcgcagggcttgccgagctcatcacggctcttcaggcggctgatcgcgcggcgaagctcgaacaggccgtatagcgtgcgagcattgcgggcgagagccttcggagcgctggggttcgaagcggtcgggagatgcgcatgagcgcgcgcgaagccctggaatcgctcaccaaagatcagcttatcgagctcgtcgaggcgtattcgaaaaaccttatcgctcttgacggcacgtggtttcagtcgatagagggcgaacttggcatggatgcggccatgcatcacgatgtggcggcatggtcgcggttcacggcaagcgaggcgcgccggttgaagcgcttcctcgggcttgccgagcgacccggcctcgacgggcttgaagcggcgctcgcgttcaagctcaataccctttcaagcagagcggaaacgaaatgggaagacggcgctcttgtctatcgcgtcgtggaatgtcgcgtgcaggttgcccgggcgcgcaagggcatggacttccatccgtgcaaatcggtgggaatcgtcgaatacggcggcttcgcacgcgcgatcgacgatcgcatacgatgcgaatgcctgagctgctttcccgagatctccgatcgaacgtgcagctgcgcgtggcggttctcccttgtcgatagcggcccttttgctacaatcgaatcatgaacgagacctggaccatacaagctgcgctcgaatggacggcgggatacctcgagcgcaaaggcgacgagaatccacggctgtcgtcgcagtggctcttgagcgaagcgaccggtctttcccgcatcgagctctacgcgcacttcgataagcctttgagcatggaggagcgcgaggttctgcgcgaatacgttgcgcgccgcggtgcgggcgagcctttgcaatacatcaccggggaagtggggtttcgccatatctccgttaaggttgaaccaggcgtgctcataccgcgccccgaaaccgaggttttggtcagcgagggccttgccgttctgccctcaccgccgaagcgcatcgcagccgatgcgcttgcgtctgatgatctccctgcgggcgcggttgaaagatccgaggcagccgcagatggcacggtgggcggtgcggcatcgacggtagaagaggatctgcttgccgcgcctgatggcaaagaaaatggagcggctcggaaagctggaagcatcgggttggatggaacccctgagctcctggttgccgatctgtgcacgggcacggggtgcatcgcctgctcgattgcctacgaacatccggaaaccagggtgatcgcaaccgacatcgcccccgaggccgtcgcacttgcccgcaaaaacgcagagctgctcgggctggcggatcgcatagaggttatcgaatgcagccttggggagtccgttgccgccgagctcatcggatcgttcgacctcgtgatctcgaacccgccctacattcccaccgcagtgcttgccgatattccgaaagaggtatccgatttcgagccttcgctggcccttgacgggggagccgacggcctcgatctgttcaaaccgctcgtcgcgtggtccgtgcgcgccctcaagcccggtgcctatatggcggtcgagctgcatgagacgtgcctggacgaagcggctgccatcgcgcggcaagcgggcttcatcgctgcgaaggtcgtggaggatttggcggggcgtcctcgcatactggtggcacgcaagccgttcgacgaagatgaggagcaacggtgagcggaaccgtgaacgagcccaagaacaagtccgcagtcgcgcaatgatgcgagaggagttgcagcatgtctgacgccgaaaacctcatagaaaacctttgcgaagcggccgcctgcatcgaaaagcgtttgtgcggccgcgctccgaagatcggcatcatattgggatcggggttgaatccgcttgccgacgggatagccgatccgatccatgtgcccttcgaagaggtcccccatatgaagaaaagcacggcggagggccatgtcgggcgtttcgtctgcggcgagcttgcaggcaaacaggtgctgtgcatgcaagggcgtctgcatgcctacgagggcaattctgctcaggaagtcgcctttcccgtgtgggcgatggctcgcctcggcatcgagcagctcatcaccaccaatgcggcgggaggtatcaacgaaagctatcgcgaaggtgatttctgcatcatggccgaccagatcaatatgacggggcgcaaccccgtcgccgatccggcagcggccgagcttgccgaacgcttcttcagcatgaccgatgcattcgaccccgcgctgcgcgccatcgcgcacgagtcggcgcgcgagggcggcgtgcgggtacaggaaggcgtgtacctcggtttgctggggccgagctttgaaacacctgcggaaatacgggcgtttcgcgcatggggagccgatacggttgccatgtcggtgtgcgaagaggtcatcgcggcgcgccatctgggcatgaaggtgctcggaatttcgcttgtatccaacatggctgcgggagtgggagccgtcggcggtgtgggcggtgcgtcgcccaacggcgaggaagtgatggattgcgcgaaaatgcgcgaaggggatttcatgcgtcttatcaccggcatagtagcgcggatgtagcatgggaaacgcatcccgcatcggaggcgtctgcttcgaagaatgcagcgagatcgaatctgcgaagggcgattgcgcggcgcgtctttcgatccacgtgcttgcgagcgggagcggcggcaacgcctcggtcatcgtcgatggagcgaccggcaaggccatcgtcatcgattgcggcatatgcaaacgcgacttcttttcccgatgcgaggaggcgggcgtttcccttgcgaacatcgaaggcatcctcatcacgcatgagcacaccgatcataccaaggggctcggcgtagcattgcgcggcatggcgaagctcggcctcgagccggcggtatttgtaagcgagggcgtgcacgcgaagagctccgagatccgtgcactcgatgccatggccgatattcgcccctataccgatgccgacgccctctcgcttggcggcatgctggttcatccgtttgcgacttcgcacgattcggtcgagtcctacgggtttcgcatcgagggtccggctggcgatgctctgggattcatgaccgatacgggtattgtgaccgatgctgcgttcgctcacctgaagcggtgccggatactcgccatcgagagcaaccatgacgaaaagctgctggccgaaggcccgtatccgtatgtggtgaaacggcgtatcgcttcggacgccggtcatctttcaaacgtccaatcggccgacgtgctcgaaggattgctttgcgacgagcttgagcacgtcatcgccatgcacgtttcggagaacaacaacacctaccggcttccggaagacgcgctttcggaagtggtcgcgcgaaacgcccatgctgctcgcgtgcaggttgcctatcagcatatgcgcgtgagcgccgaataaacccgttgcgccgagcaggtgcttccacgccagctgtcttgtttcggcggtgctggaagacgagccgtccgattcgtttctgcatcttggctggcccggcttcggcaaaagggtctggttcgttcgattctcgcgtttttcgctcgggcgctactcgtcgaacagctcggttgagaagtaacgctcgccggtgtcgggcaggatggtcacgacggtttttcccgcaccgagtttgcgtgcgagcctgcgtgcggcggcgacgttcgttccgctcgagacaccgaccatgaggccttcttcgcgggcgagcaggcgtgcggtttcaagcgcctcctcgtcggaaatcacgcaaacgtcgtcgtagatgtcttggtcgaggatatcggggatgagtccgtcgccgatccccatctgcagatgggttccgatgccgccgcccgagaggatcgcggcgttttccggttcgaccgcccagatggataccttgggatagagggccttcagcacttggccgatgcccgagatggtgcctccggtaccgatgcccgcgcagaaaccgtgaatgggcccttcgacgtcttcgaggatttcgagggcggtgtggtacttgtgcgcaagcaggttatcgacgttttcgaactgttgggggatgtagacgcgcgagtcttcggcggcaaggcgctcggcggtggcgatgcattcggcgatgcacttgccgatatcgccctcgtcgtgcacgatgatgacttcggctccgtagtggcggacgagtttgcgccgctcgacgctcaccgaatcgggcatgatgatttttgccgcatagcccttgacggcgcatacgagcgcgagaccgatgccttggtttccactggtgggctccacgatgatggtgcctggtccgatgtctccgcgggcttccgcggcggcgagcatctggaaggcggttctcgttttaatggagccaccgacgttgatgccctcgtacttgaccaatatttgggcggcattttgttcggaaaaatgattgaggcggatcatgggcgtgcggcccatggcttcaaggacgttgtcgtagatcatgctgtagtctttcgcgatagcgggcaggggcaagcttcagccgccctaaggcgaccaagttctattgtaccatcgcagcaaggtctgccctgcgagagcgcgccggtctgctcaagaggcgtttcgggggtaaggggatgatatctcgtgccccttgcacccgaaagagccgaggggggcgcagagcttgcgcatttggcctttgtttgctgcgcaaggggaatcggaagatggcgcccaaggcatgcgaatgcgggtatgcggagatgacgggcattcgcatgcccgcctttggcggatctacgcgtcggcggcgggcgcggatatcgcccagagcgattcggattgatcgaggatatcctcgaagctccatcctctgctgctgcgggagtcgcttgcggggtcgtgcacgacgagcttgctgtccatatcgatgcccgaaagcacgatgaagctttgcgtatcggtgaaatcaccggggccgacaacgcatatcacggggtttcccgcgatgatctgcttgcgaagactgggttcgtcagcgggtacctcggctgcttgcaggccgagggcgcttgccgtttcggcgacgaacgccgggtcggtcgtttctttcgaggcgaatccttcgctctcgattatcttcgcgatatcgttcggcagcgtttcgttcgatccagtgatcgcgacgtatgccatcgtcatgctcacaggggcctgcccgcaagcgccgagcgtcgaagaagcgtaagcacgctccgaccactgcaggtcgttttggtacaggttgggcactttgcctttcatccaatcctgctgaggcgtgctcgttgcggttttggccgttttcacttcttcgtcgaagggaagcagcggcagcgatcccgagaacacgtgcgattcgtcgagggcgttggcattgctttgggagacgccgagcgcgattgtcccgataccgaaggctatcagagcggccaagacgacgaatgcccctgccgtgtagcgtctgccggcgcgtcttcgctcgcgatatgcttcgatgggggtgaggagggccggattgcttgtctgcgcggtgcccgtccagttgaaacggctgatgcgccggggggcgggtttgccagggtccgctgggccgcagggcgcggtttcggcatggggagcttcggtgtgggcaccgctgatttccggttcggggatgatgcggtatccgcatgaatgaaacgacaggtagagcctgtgcggatacgacatgtgcctctcccccctattcccgataacctatttccgataaacgccatgcagagcgaatgcgattaacccagtatacatgcaggtaactgcataccgtcgtcgaaaccggttaatgtgccaagatgttgaacgtacgttaccgggcgttaccgggcgaaaaccgcagaacggaagctcgtatcagcatctcgaacgctcatgcggctttgcgttggccgtcgtttccgttccctttctcgaacagctttggtgcccttcagcggttgataagatcatccctatcgaaaacaggcccgaaaatggcggtcaaggcaagcttctgtcggcctcgccgcgtccggatcgctctcttgccgacgtttgcgcaggtcgcgaaaacccgaatcgcgaaggcgctccccgaaacgcccgaaacggcgcgtattctcgacagaagcttgccttgaccgccattcagagcggcgttttagctaaggaagagcttcccttgttccgcgaggcgcttcgagcgggcgaggcgctcggccgcgcttttcgcaaagtccttcgatgacggcgcttcccgggcaagccttcggcacccgtgccttccgggcaagccttcggcgcccatgcctcccgagcgagccttcggcatccgtgtccgacgtgcagccgctggcatctattccttctaggcgagccttcgacggcgctcaacgtgtgggttgtttcgaggcgaaacgtatgactcgcttgacaataacgagcacaaaaggcatgcttgcgcactagcggttcgaacaagggggttgccgcgtgcttctggacgacatcgaaatcttcatggtcatatcggagacgaagagcctctcccaagcggcggagcggttgtacatgtcgcgccccggtctttcgcagaaaatcgccgccatcgaggcgcgctacggaacgaagctctacgagcgtacctccacgggtgttgttcccacggcggcgggccagatcgtgacgaagttcgcgaagaagatatcgacgctcgaaaacgcgcttgcatcggagcttgctgcggtcgacgagcatttcgacaacaccatcgaagtgggtatgagcttcaacgacggcgttgctctgttgccgggtctcgttaaaaaatttcacgatgaacaccctgaagccctcgtgcatctcgacgcaggttacgaacccgagctcatggcgaagctcaaagccggcaagctcgattttgccatcctcgaaaaccagccgctcgaagacggcctgtcgcgcgagacgctcgggtacaagcgcttggtgttctgcgctcccgacaagccgccgtacaattccgtgccacagccggtcaagatcgaaacgctgctcaagtggcccatgatcatctacgaatggaattcgggccgtcatatggtgggaaaccgccattttcgcgagcggtacggcatctcgctgaccgatcacaatatggtggcgcagttcgatacccacgaggccatggtgaacggcgcccgagcggggctcgggtgggcgagcattccggaatgcattgcggagcgatatcgtaacgagccgggcctcatctggttcaaggtggacaccgatcccatgcgctatccagtcgatctgacgtggcatactggtcatatcatgtctgatcaggcacgtttgtttatggagttcatcagagaaaacgttcccgacggctatttcgggaagcacgcctgagcgcagcgattcgcctcgatttcaggccgatggcatcgggcggctcctgcctgcgtcgcgtagcggatcgcgcagtcggggtccgacgcagccgagcgttctcatcgcacgggccttcggactgagggcgcagtgccgtacgcggcgattcgccgtgctttcgcatagctctatccgctgtcaagttcgctatgcagccgcggtaagcaaagcctgcatgtaagctcagcttacggcggttgaaatcgattgcgacggcgaatcggcaggtgacgttcccgattgttccgcgccgccgtattctttgccccatggtcagaaccggagtgcaccgatggggaccccgcactgcatgatcgatgcctccgcgatccgacaccgcaatcgagccgccttcgggcggcgcaagacgaggaggaatcggtggataaacaagacatcatcgacgcacggaaaaaggcaagggagggcgagcgcatcttctacacctcgtgtccgaacaacgggtgctgggattcggcctgcatcctgaaatgccacgagaaggacggcaagctcatcgccatcgaacccgatgacagcatcaacgccggcatgtgccgcgaggacgtggaatgggagagcatctggcgcggcatggtgcagatgcgcccttgctcgatggggcatgcatggaaggaagagctctacggggaaacgcgtctcacccatcccatgaagcgcattggcgaaaagggtccgggcaagggctacttcgtcgagatcggctgggaggaggctctcgacaccatcgcggagaagatgatcgagatcaaggaaaagtacggcgagttcggcatcttccatacccagtacggcagcttcagcaaaaacggcttcccgcttgccaagtggtggccggcgagcttcggcttctggggcgaccattccacctccggccatacggctggcgagaatttccatctgggcttcgacctcaccaaatcgatggtgagcggtgcgagccctgcgcttccgggcttcgaggcttccgatgtgttcaattccaagctcatcatcatgtggggcatggatccggtcgtcgactggtttggtccgacatcgtattacatgcagctcgcgcacgaatacggctgcaagaccatcgtcgtcgatccgcgctacacggcaagctgcgaggtgctcgccgaccagtggatcccgattcgcccgggaaccgacctcgcgatgcttttggctatggcccaggtgctcttcgaggaggatctttacgatcacgactacgttgcggaatgggtcgaacccgaaggcttcaaggagtggcgcgcctactgcctcgggatgggagaagacggcattgcaaagacgcccgagtgggccgaggcgatttgcgcggttcccgccgagacgattcgcgagttcgcgcggctttacggcaccaccaagccggtccatctgcagtacttctattcctgcgcaaagcgccaccttggcgagtacagcgctgctgcggccatgttgctgcaaacgatgaccggcaacctcgcgtgcccgggtggctgccagaccggctcggccctgccgactcccggccgcattcccacgcctttcgctgatttcaaacaggcgccttccgactacacgatcccggtgctctgcaacaacaacaagcttaccgaaacgcttgcctgccagaaggactactgggaaggccgtatgagcgaagaagagttccgccatcgcatcggcgcgccgaccgatgacagcccgcttcccaatattcagatgctcatcatcgagaacaactacgtgaacaaccaccacgacacgaacaagcgcatggagggcttcgcttccaccgagttcaactggggcttccagtggcacaagaatcagccgtcgatggaattctgcgacatcgtgctgccgagccccgtatggcagttcgagggcatggaccagtacatgtacggccatcagcgtttcgtgagcggtccttcgggcatgcgcaactacttcgtgttcagcgatgccggctgcgaatacccgggcgaggtgcgttcgaaggaatgggtgtggacccagatcgccaaacgcctcggcgtggccgagcagtacaacccgcgcatggtagacgtagagtgggaagattggacggctgcgcagcgcgagatatacaaagaagcctacgaggagtgggcagaggataagaccggcgttctcaaacgtttgggaatcgaccccaagccctgggacgagttcgtcgccaatcccgtcgtgcgcataccgatcgatacgccgtactacccgtacaagagctgcctcgaggcgggcatcaatccgttccagaccgagtcgggcaagatcgagttcgtatcgagcttcgtgaagaaaaacgatctcaccaaaaccaagtggcgcggtcagttcgatccgatgccggtgtgggagccaagctacgtcgagggggatatcgcgactgcggcggccgacggcttctacaacccgaaggccagcgaatacccgctgtctctcgtcacgccggtttcggtataccgccagcactcctcgaacgataacaacccgcttctgcgcgaagactgctatcgccatggcgtgtggatttcgggcgtcgatgcgaaggcgcgcggaatcaaggacggcgatgtggtgcgcgtttacagcgagacgggcgagatggagcttgccgcgtatgtgacgaaccgcatgatgccgggcaccgccgcggtgcaccatggcgcgtggttccagggcggaggcaagaagaccgagctcaacccgtacggcatggatatgcgcggtgcgcccaacatcctgctcgacgacgtgcatctgcccaacatcctgggcacgctgcttacggcggggctcgtcgaagttgagaaggttgccgacggcgacgttgagggctacgggcccgaggccgagcgttcgggcatgcgcggcgcggcgacggcgatcgcctcgcgcgaagcgctgggagagaaggaggccctgtaatgacgcagtacggattccatttcgatcagaaccgctgctacgcgtgccaggcatgcagcatcgcctgcaaagactggaacggcatcgatccgggcgccgagaagtggcttacggtgtacgagtgggagacggggacgtttccgaacatacgcatccatccgcttgcgtactcgtgcgctcactgtgagaagcccacgtgcatttccgcatgtcccgaaggcgcgatctacaaagaggagacttacggggcggtgctcgtcgatcaggacaagtgcaccggatgccgcaagtgctacgacgcctgcccctacggggcgccgaagttcgcttcggacgacccgggcgagaagatgagcaaatgcaccatgtgcatcgaccgcttggaagagggcctgcagccgctgtgcgctgcgtcgtgccccctgcgcgcgttcgacttcggcccgctcgacgagcttatcgagaaatacaccgacatccgctactgcgaggggatgccgtctcccgagatcaccgagccggcctacctcatctggccccagcgcgagaaggagccgctcgttcccttcgatgcggagcgtgcgatcgagctcaaccgccaacgtggcgatttggggacgatgttcgaaagcaaggaagatctgactgaattcgagagcgggaccatcggccgcagcgagcttcgcatgaagcacgagagcatggccgagctcatgagggcaacccgcaacgatatggcgtaaatcgctgcggccttcgggccggggcgggccgaaggcgttcgccgatctgccttcagcgcgatcggcgaacgcgcggcctcggttttgcttgcgaacggttgcggcgcgaggtgccgtaaccgacgtggggattcgtttccaaagcgtgcagggtgctttgccgccagattgcgaatgccggttttggaaacggaccgggtgcccatgcgggattcccattgcgcgggatcttcgcgggggcgccgacgaatcaggacgcctgtctgttggcaggcggaaaacgaaaggggagtttcatggagtggataggagtagtcggcatcatcgtcggcctcgtgttcttcgtcgttgcagccatgaagggctggaacgttctcatcacatccatcgtaaccgctattatcatcgcgttcaccaacggcatggatatcggcgcggccatggtgggcaacgaatcgtcgtacgtgaccggtctggcgggcttcgttcagaagaacctgcttatcttcatgggcgccgccatcttgggcgaatacatcgacaagtcgggtgcggcccgtgcgatcgctcaggcgatcatgaacaaagtgggcaccaaaagcccgtatctggtgcttctgggcatcgcggcggtgggggccatccttacctatgcgggcatctcgatgttcgtggccatgttcgcgctcattccgctcgcgcggcctctgttcaaggaatgcaacatcccgtggcacctgttcgccgccgcgtggtcgctcgcggcctgctcgttcacgatggcgatgattcccggtgttccggccatcgcatggatcaacgctgcaaacggatgcggcgtatcgctgactgctgctcccatcatgggcatcgtcggttcgctcatcgccattgtggtttcgtgcctgtacatcaagttcgcgctgaagcgcgctcaagccaagggcgaaggatacgaggcggccggggaagacggcgtcgttgcggaagagaaaaaccttccgaatctgtttgtggccctgcttccgctcatcctgctcatcgtcatcattatcgtgggatcgcagctccaggttgccaacatcgtctacatcgccatgatcgtcgccgtcatcgcctcgatgatcgcattcaacaagcacatcgcaagccagcgcgacgttatgggcacgggtgcgaagaactcgctcgggcctgcgctgttcacttcggctgcggttggcgtcggtaccgtggccgccgcttcggttggcttcacggcgatctacgaagctatcttcaacatgccgggtggcgcatacgtctcggccgctatgatggcggcagtgctcggcggcgtcatggggtccggttcgggtgcggtcggcatcatctcggccaacttccttgctccgtatctggccactggcgttgatccggcggcgttggccaagatcatcgccacttccgccaccatcggcggtgctctgcccaactcgggcgccatgttcggcatgcttgccgccatgggattgaaccacaagaactcctacaagcacatcgccgccatttcgatcggcgccggcctctgcgcgctggtggtcatgatcatcatggcgaatatcggcatcgtctaggtgtttcacgcgggccttgcgtggcggtgcaaggcccgcgatctgcgcttttgtttgcatgcaggcagcgcgaattccgtggaggcaatcacgccgcctgcatcgcacgagagggggttgagtcagtatggagtcatcggaagggaagggctctgcaaccgagcaggtgtccttgttcgaaaaggtgcccgaagacaagaagctcggctggacgggcgtcgcggcaatactctcaggcgtcgtctcgagcctgaccaagctcatgggcggcggtattgtcgcgtactacgccgggtgctatttcgggctgggggctgcggccatcatgttctgcttaagcgtgtttttgacgttcttcgtcggacgcatctcgcttcgcgagggcctgccgagcaacgtgacctcgcgcctgtacgtgttcggcaccaagggttcggcgctcgattcgcttatctggatattccttttggtgggaacgcttgcgatcggcaccgtgcagctcggcaatgcggtcatctactacttcggctggacagacgagatcgtgaagcacctgctgtacctggccatctcggccgcgtgggtgctgatgtcgctgttcggcatgaaattcatcgcccggttcaacatggtgttcgtggtcctgctgtttctggcgcttttgttcgtggcgggcagcatcgcccaagacgggcatctggtcgacgcgctcacgcatggggtgctcattccgcacgtgggccagctcgaggggttcgcctacgcggtgaactacagcatcatgacgtcggggctgatggcgctcttctcgtcggacttcacgaggttcgtgaaaagagagcgcgatatggccgccatttcggtggtggggagcgtcttcgccgtgctcacttacgtgttcggcgcgcttctggcctactacggattcaacgtgtcctacgagtactttctcgggcaggggctggacgaggtcgctgcggcgaatgccgccattacgaaccccggcatcacgttcgttttgtcgctcgggcttgtggggctcgtcatcatctgcctctcgcagctcaaggtggagacgtcgaactccatcagcagcagcaacgccatatcgaatctgtttgacagcctgttcggcatcaagctgaaatggccgacggcggtcatcgccgtcaacctgataggcctggtgttcatcttcggcaacatcctcgatcgcgtgaacgcgttcatgggcatcggaagcatcctcacgatgtcgtggtgcttcctgcttatcaccgattactacatcgtgcgcggtgggctcaagataggtacgcgcggcatcgtatcgctcaagtacatcgaagcggtgaactggcgaggcgttgcgacgatcgtcatcgtcacgctcgttgcggggacactctatgcgacggggaacctcgccgtgccgtttctgctcgtcgcgccgatgacggttgcactctacacggggctgagcctcgtgttcaggaagcgcgtcatcgcgcgggatcgggtcatgcgcagaagcgaacgcgacgaccccgagctcgccgaagaggtggcgcgcgtttctgcgggcgagcatcccggcgcgtcttccgacgcgtatgcgggcctctgagggccgcgccggctcttccggcgcgccgttgcagggcattcggtccggagtcctttcggacctgccgataaagatacgagagaaggagatccatctatgtgcttcagaccaccgacggtagacgcaggccccgtgaaatgccccaaatgcggggccgaggtcgatcccaaagccgacgagtgccccagctgcggcgcgaaagcgacgcccgctccgggcatgcccgccgcccccggcgcgccggctgccccgaaggcccctggcgcgccgagcgctcccaaagcgccgggagcccccaaggcaccaggggcgtagaggcggcacccgctgcggcgtcgtcagatttgcaagggcgttgcgtttgtggtgcggttggcgtatcgaggcgggtatcggagctgctccgggcccgcctttgcgttttgacaggcgcagctttgcctgcagttgcgtttgccgttgcggtatggcccgtcgtttgcgggggggggcttcgcgagacgagcaggcgcatgcctacattggcttgaggttcttatcgagccgttcgatcatccacgcgaggcgcctgtttcggcccgcatcggttttcgcatcgaagtacgcgcgcgtataggttttcttgaccgacggcgacatggcaaggaagtttgcgtgtgcgggttcgtgcccttcgagcgcccgggcaacctgttcgatctgatcctcagttgcctgctggggttttggcgcatcccattggccgtttcgcttggcttcttcgattttcgcgcgcccgtggtcggtcatggatccctggccttcgagcttttcgaccagggccttgttcttctccgaccatttgctgttcacccggcgctgcgagaaatacttgcggtaggttgcgccgtcgatgctttgcatctgcccgtcgatccatccgaagcagagagcctcttcgagcgcttcggatgctttgagcgtcttcggaccgcctgctttcccgaacaaaagccagacgccgtcggttgattcgcagttgtcggcgagccaggttctgaaatcttcgcgggtgggaaagcagatcggctcgttcatggcggcctccgtcgacctcgatgctcggacaatggtgccatcttactataaaggggcgactcgaaccgccgaagaagccgcttttgttgctgaatctcgatcggcgcagcgtccatcagcgatggaattccttaggttcttaaagtttttttcgccgattcgaaaatcatggttgcgcgcaggggaatcgcgagtatactcggtacccaacaaatccatagcttcaaatgcgttgacgaggaaagtacggacgaatccatcttcagagagctggcggttgctgcaagccagtggtggacggcccgaaagccacctttgagcagtcgagttcgaacgacatggacgcagccaggcaactcctggcgtgcaccatggcaagtagtcttgaaccggtgacaaccgttatcagtccgatcgaagagcgcagcgtccgaagcgcgcgtgtcttcctttacctgatggtcctggtgcaagcttcttgcggcgggattttttgttttcagggtgcaatggccgcacaccgatcgcccgcagggcggcatcggctgttcgggctgcaccgcggcatatgacggacggaaggaaggcatgacatgcactatcgcagcgatgctgtgaagacgggggttgcgcgcgctccgcaccgcagcctccttaaagccgatggcataaccgacgaggagttgggccgcccgctcgtcgccatcgtcaactcgcgaaacgacatcattccgggccataacaatctcgataagatcgccgaggccgtcaaggcgggcgtctacatggcaggcggcgtgcctttcgagatttcgactatcggcgtatgcgacggcatcgcgatgaaccatgagggaatgcactactcgctcgtttcccgcgaggtcatagccgactcggtcgagtgcgccgtgcagggccatcggttcgacgccatggtgtgcatccccaattgcgataagatcgtaccgggcatgctcatgggcgcgctgcgcgtcaacatcccgaccgtgttcgtgtcgggcggccccatgctcgcgggaaagcaaccgggaggatacggccccacgaccgatctcaatacgctcttcgacggggcggccgccgtggcaaacggcacgatgaccgaggaagagcttgcgtattacgaggataccgcgtgccctacctgcggcagctgctcgggaatgttcacggctaactcgatgaactgcctgaccgaagcgctcggcatcgcgcttccgggcaacggcacgattcccgctgtgtattccgagcgaatccgcttggcgaagcatgcgggtatgaaggttatggagctgctcgaaaagggcatcacggcgcgcgacatcgtgggcgaggcggccatccataacgcgatggaatgcgatatggccttcggcggctcgacgaacaccgtgctgcatttgacggcgatcgcggccgaggccggccatccgatcaccatggacgattgggacgaggcgtctgcgcgcacgccgcatctcgtgaagcttcagccctcgggtccgcgcccgttgtccgatctgtacgaggtgggcggcgtgcccgtggtgatcgccgagcttgccaaactcgggctcatcgacgagagcgcaaccacctgcatgggatcgatggccgagtacctcgcgcatatgaacgagcaatgcatcggcgccgacggcgaggtgtgccgcaccttcgagaacccgttttcggaagcgggtgcgctcagggtactccatggcaacatcgctcccgatggtgccatcgtgaagaaatccgccgttgatccagcgatgatgaaccataccggccccgcctgcgtgttcgacggggaggaagaggcttgcgcggccatcaacgaaggcaagatcaaggcaggcgatgtcgtggtcatccgctacgagggcccgaggggcgggccgggtatgcgcgagatgctcatgccgacatcgtcgatcgtgggcatgggcctctcgaaatcggtcgcccttatcaccgacgggcggttctcgggtgcgacgaaggggccggctgtcgggcacgtgagccccgaagctgccgcgggcggtccgatcgcgctcatcgaggagggcgacagcgtcaccgtcgacatcgagggcggcgagcttgttctcaatatcgaagaagcggaattcgagcgcaggcgagcagcatggcagccgcccgcgcagaagcatgatcacggtgttttggcgcgatatgcgaaactcgtcacatcggcagacaagggggctgttctctcatgagcgcgaacaagacggagaagcagggtaaaaccatgacgggagcccaggcggtcatcgcctcgctcgaggccgagggagtcgatctggtattcggctacccgggtgggcaggctatcaagatctacgacgcgctctacgactcgaaggtgctccgccatgtgctctcgcgccacgagcagggtgccgtgcacgaggcggacggctatgcgcgggcgacgggccgcgtcggcgtggccatcgtgacgagcgggccgggcgccaccaatacggtcacgggcatcgcgaccgcctacatggacagcgtgcctcttgtggttatcaccggacaggtgccgcgcggcgtcatcggcaccgactcgttccaagagtccgacatcgtgggcatcacgatgccggttgtgaagcacagctacctcttgcaaaccaccgatgagctcacgcagaccttccgcgaagcgtttcacatcgcgagcacgggtcgtccgggtccggtgctcatcgacgtgccgagcgatttggcgagcgaagagatggtgttcgactatcccgacgaggtgaaccttccctcctacaagcccacctacaagggtaacgtgaagcaagtcaaacaggcggtgaacctcatccgcgaatcgaagcgcccggtactctacgtcggcggcggcatcgtttcctcgggtgcaacccccgagctcgtcgagctggccgaaaccatgcagattcccgtggttaccacgctcatgggcaagggagcgtttcctgcgtcgcatcacctgaactacgggcccatcggcatgcacgggtctaagttcgcaaatatgatcatgaccgaggccgatctgatcatcgcctgcggcgcgcggttctccgatcgcgtgacgggcaagctttccgagttcgctcccgatgcgaagatcattcatatcgatatcgaccccgcagagatcggcaaggtgcgcgaggttcgggtgcccatcgtgggcgacctcaagggggtgctcgccaacacattggccgagctctccaagcaggcggttccgcctgcgcccgccgcatgggtggaacaggccgatgaatggcgccgccgcttcccgttctaccatccgggcgtgggcgaccgacccgacgagatcgtgcccgagatagtcatgagcacgctttcgggcatgctcgatcctgcgaagagcatcgtggtgaccgaggtgggccagcatcagatgtgggcggcccagcacattcagcgcgaagccccgcgttcgttcatcacgagcggggggttgggcacgatgggcttcggctttcccgcatcgatcggagccgcgctcgggtgtcctgacaaaacggtcgtgtgcgttgcaggcgacggatcgtttcagatgaacagccaggaaatggcgacggctgccattcagaacgttcccgtgaaggttctcatcatggataaccgctgccttggaatggtgcatcagtggcagaagctcttctacaacgagcgctattcttcgacgctgctcgatgcagtgcctgatttcgtcaagctggccgatgcttacggttggcaggccgcccaggtcagccatcccgacgatcttgagcaggcgctgcgcgccatgctcgatgccgagggcccgtacctgctcgacgtcgtgatttcgcgcgagcagaacgtgtatccgatggttgcgcccgggaaggccatgagcgatgtgatcggcgcgatcgacgtcgccgtcggtgcggtgcgcacgctgggcgatgacgaagaagagaggggaggcgctcggcgatgagacatattctttcggttctcgtagaaaacaaaccaggtgttttgagccgcgtgacggggcttatctcgaggcgcgggttcaacatcgagtcgctgtcggtcggaccgaccgaagatcccacgatgtcccgggtgaccgccatcgtgaaggccgacgacgtgtcctacgagcagatcaccaagcagctccacaagctcatcagcgtgcacaagatcaccgacctcaccaacgatgcggcgatcgagcgtgagctcgtgctgttcaaggtgaacgccgcccccgagcgtcgaaacgagatcatcgagatcgcgaacgtgttccgtgcgaagatcgtcgatgttggcagaaattctctcaccatcgaagcgaccggggacgaaaacaagctcaagggcatggaggatctgttccgcgcctacggcatcaaggaaatcacgcgcaccggcaaaattgccatgtcgagaaatagcaaggattaacgggatcaccagtcaaacgaaaggaacggaaaaacaatggctgtaacggtatatcacgaaaacgattgcgatcctcggatcatccaggacaagaaggtcgcgatcatcggatacgggtcgcaagggcatgcccatgcgctcaatctgaaggattcgggctgcgatgtgcgcgtcggtctgcgcgaaggatcgcactcccgcgccgatgcgcaggaagccgggctcaaggtcgtcgacatcgcgacggctgcggctgaggccgatctcatcatgatcctcacgcccgacgagacccaggccgaaacctacaaaagcgagatcgagccgaacctcaaggcgggcgatacgcttgcgttcgcgcacggtttcaacatccactacggctacatcgagcctccggcggacgtcgatgtcatcatgatcgcgccgaagggtcccggtcacatggttcgtcgcgtgttcgtggaaggtgcgggcgtcccgtgcttggcttgcgtcgcccaagatgcctcgggtaacgcgatggccacggcgctttcgtatgcgtggggggtcggcggagcgcgcgccggggtcatcgagaccacgttcaagaacgaaaccgaaaccgacctgttcggcgaacaggcggtgctctgcggcggcgtgacggcccttatcaacgccggcttcgagacgctcgtcgaggcgggctatccgcccgagatggcgtacttcgagtgcttccacgagatgaagctcatcgtggatctcatgtacgaaggcggtatggccaacatgcgctattcgatatcgaacacggccgagtacggcgattactacgccggtccgaaggtgatcaccgacgagtcgaaggcggccatgaagaccattctcgaccgcatccagaacggcgagttcgcccacgagttcatggaggactcgaagaacggccagaagtggctcaaggcgcaacgcgaggagcacgcgaacgccccgatcgagaaagtcggtgcggatatccgctcgatgttcagctggatcaagcgctagccgctcggacgttcgacgcgggtttcgctcaagggttcgcgacgggggctgtgtcaggcgacgcagcccccgtttcgcaaaggatcggttaatcgcataggtctacgatggcgtaatcatcgatgtcttgcgatgtgtgaacgacccgccagacgataagctcggattcgctgtacgaatagaagagccgataggcgcctacgaggtaggtgcgccttccttggatcgtcaggcgttcgtcttcgaacgttcgaccgaggtcgggaaactcgcagagaagcttgacgctgctttgcagactgtcataccaggtacgggctttgccaggggattgtgcaacttgtccgagatacaatacgattgattcgatgtcataggcagcccgcgggcgatagattgccgtgcgcatgccgggctagccgttccaggttgaaaagatgctctgcatgcgcgcgtcaagctcttcttggctgactgcttccggacggtaccgcgcttcgatctctgcttcccgaagtttgagaacgtatcgttcatggtgacgttgccgctcataggcctcgcagtccatgacgacgagtgctgcaacgccgttttttgttaagtacagcggttgttggctctgtcgagcgtcttcgcaaatgccattgagatcggtgcgtaaatcactgatgggacgaattcgaggcaatggtgacggcataagcactccttctttgtttctcgtgccttgcagtatacaaaattttgcacaaatattgaatacctatctgcgtatgaagcagatctttatgctctggtagctgtcatgtattattgaacgagctgcaatttgccaatcgttttcgaatgcttggaggcagattgatctgaagcaatgggtaatcgcgaagcagaaaggctggaagaagatgttgttgaaaacaggcagtgcgggcgtttcggcgtcaacggtgcggcgcaaagcgtgtcgggggggggttcttgtttaagagcggctctgctggctctttcattttgcttggcggcgttggcccttgcgggatgcgctggcaccgattcttcaagtgggggcaatgccccagcgggcgatggtgcatccgctccggttcggagcgaaccgccccgaacagaggagcgcccggctgctgcctcggtcgatacctactacgttcgatacgcgcgcggaaaaaccgcaacccaactgacctccgtgtcgggggaggttgttgatctgcccgacggataccaggtcgtaggaccctattcaaacggtttggctatggtgcgctggcttgaaacctcagacgaccgatggggagtcggtaccgacgggaacttcgactacgggtttatggacgcgtcgggcaaccttaaaatcaaagtggacgatgcggcggcttccatagggttgccggccgaaaacgacgaaggcgccgctctgagatgcacgcccggtgcgtactttcaggaagaccgggcggtgctggactgccggtacggtgcgtctggcaacgggtaccatttctcgctggtgattgacgcgcagggaagcgtcgtcgcctggacggggctcgatggcgggcgcatggacgtcggggcggcggcctctttgccctatacgagctttcccgactcaatggagctcgtcaacttccccaatttcgatatctccagcgcatacgagaaggggcttctgcagactagtttgggcacgtctctggcccaagaccatacgatcctgctcgatgcggatggggaggtgtatgcgaacttctacgggtcggacagctacgtgcgcagctcggacttgctgaactctcgctatgtcgtgggcggtctgtacaacgtgtgctcctatgaggcatgggtgcccgaggcgaaccccgtcgacgtattcgatatcgtcgacatcttggaagccgaggacttcgacgacgcccagatcgtcggtatggcgggggatgggccggtggtcatcattaacgcacagtcgaacacagccaaaggggagcgtgtgctgacgggcctgtatgatttcgaggcaggttcgtgggttgtcgagcccgtgttgggcggcagtgcgcaggcggcccactacgacgtcttccccgtcagtatcgaagggaaatacaacgaatcgtacgaaggcggttcgtgcggccttatgtccccggacggaatgtggctgtttgcacctgacgttctctacgatggcgagatatgcagcgagtttacgtacttgcatggctcttactggcttgcgaaagtcggcaaaggcgatagcgaacgtagctatctgatcgatgctgcgaatccttcgctccagccgacttgcgtggaggaccttgtgctgcccgaagacttccgcgagaccgatgccatggacgaggagctcatcgaaggcgcttcctcgcgcagccaagagaggggggaagtgcgatgagcacgagaatcggtttgtcgcgctcccccaaaatgcgctttgcgatgggttcgggcgaagcaaatggagcggatttgagaggagaagccaagatgcggttgaagctcgggtcgatgctcatcctggctgctgccgttttctcgttgtgcggatgcttaacggggtgctcgggtgaaacaggagctcgaggcgcggttttcgcgccccctcagctggacgcgtctactggtcctgccggcgcggaagaacagatatcctatatcgtgggcaatgccggtcaggcgctgcccgttgaagagcgtccttcgcgcgttatgcagctgggggtggatgcaggcgcaggtgtggctgctcaggaagcgctgcacatgcaggagtggacgaactacttctatgacgagtctgggcgcctcgtgaaaacggcgacgttcggagagacggttctcgctaacacgacgtcctcctacgagtacgatgcggatggcagactcctatcggcgcgggttcaaacggatgacggagacatcgcctctctcgactatgtctacgaacggggaaggctggcaaaggcggaggcgacgacgtgcaaggggggagagtcgagcggctcttccgtcgaaacgtattcatacgacgatgacgcctgcgcccttacggtcgacaggtattacgcggacggcgccttgaaagagaccctggtggtgcgcttcgatgcgaatcatccttgggaaggtaatcccctcgattacgacgggggacgcatgatatccaccgatggttacactgcggaaggcgagatgaagcagcacgacgagtttgtctacaacgaagacggcaccccgtcgctgaagaccattcaggtgcttcccgtcgacggcggcggggaatcgtacagcgagcgcgcttacgcctacgatgaaaacggattcgaaacgtacgtgaccttcaagcagacccttgccgacgtccatcaagcgtaccgtatcgagcgcacgttcggcgccggcggaaggatgacgcagaaaatcgagcggtctaacatgggcgatgaggtgcggacgtacgctcgcgacgagcgcgggcgtgtcgtcgcgagcaagtgcgtctccggcctggcccccatcgcatggtatccctccctgacggtgtaccagtacgatctgggtctgaccgaggcatcttcttccgaggagggcatggaagaggcggcatcgcaatacgaaagcgatcgcttgagggagagctacctcgatttggcggccgtgtacgtggcgggaagctatcaggctaggagcggaagcatgtacgatgggtcgcagccggtgctcgagctgcatgtcgacggatccggcactttcgatggcgtttcgggcagatgggagtgggacgataccgctcgtgccgtctacgcctacaccggcggcgaggctcccgcgtggtacgtctgggggcaggaggcgggctatccgagtgggcagcgcttgggcgatggcgcattcgccgagttcgaccgcgtgcgcgacgagaacggtgtgccgattgactgacgcacgccgttcggtttcgcagcaaggggcgtatcttgttcaggacaacgacaggaggaacaatcatgaatgctggttgcggaagaagaccgatgggattgaatgcatcgggcattgcctcccggatgatcggaatagcgatcgcgttgctgataggtctcagcatcgtgtcgggctgttcttcggaggaatgcgacgattgcgggaaaacgttttccggccaggcttactaccaaagctatgtgtcgaatgcaagctacaacccctatcgggaagatgggggagagttgtacgagggcgtcggcgcgatctgcgaggagtgcgcgcgggatcgctggggaggtgattatcgagaccacaaggcgaaatagcgcaatgcatggggatgcgcaggggtcacgtgccctttgcccctcagcgaggcaaagggcacgaaggcggtctctgcatgttgcgttttcgattttgcgctgatgcagaaaatgagacggcttagaggctcggttatggcgcagcggctgttggcctcgccgtgcctttcgcaaatatcgttgaggtcggtttgcgagtcgctgatggtccgaatgggcggcaacggtgcaggcgcggtatctttggctttcttcgctgtacggtgtgcaaaatctttcataagtattaactactccaataaacggaatccgttcgcaccgtatagatgagaaatcgctacactgtagatatcgagacgaagcaggcgaaaaggggagaagatggcagatattctggtggttacgggaagtccgcgtgcgggcggaaacacctcgatgctcgccgatgcgttcatcgagggggccgagtcggcgggaaacgccgttacgcgcatcgatgtcgggcgggcggacattgcgggatgcctcggctgcaactactgtttctcgcacgagggcgcatgttgccaagaggacgacatgcaaaagatatacccgctgctgcatcgctgcgatacgctcgcctacgtgacgcccatctactgcttcacgttctcggctcagatcaaggcgttcatggaccgtatgttctgcggcatagccaagccgttctcggtcaaatcgacggtgctcttgaccgcgttcgaggacaaagaccattccatatcgaagtacatgagcgatacgtaccgggcgctcactgcgtattcgggtatggaggacaaaggcgtcgtcgcggtcggcagcgtgttcgagaagggcgcgatagagggcaaccccggattggaagaggcacgcaaactgggagcgagcctgcggtaggggtgcgcctggggcaggggtgccgttgcgccgaaaatctggtcggcagccgtttttgccgcattgcagcgcccgcttcccgaaacccgcgctagaatgctttagagagctaaagtgctgacgcgctatgaccgtacaggcgcgctcgctcgcttcaaacgattcattgactgataggagatcgtgaacatgggtagggtgtataacttctcagcgggaccggccgtgctgccggaagaggttctggcggaagccgcagccgaaatgctcgattatcgcggtgccggcatgtcggtaatggagatgagccatcgctcgaagcccttcgccgaaatcatcgagactgcagaagccgacctgcgcgaactcatcggcattcccgacaactacaaggtgctgttcttgcagggcggtgcctcgcagcagtttgccgccgtgccgatgaacctcatgagaaatcgtgtggccgactacatcatcacgggctcgtgggcgaaaaaggcgtggaaggaaggaaagatctacggtgacgcccgcgccatcgcttcgagcgaagacgaaacgttctcctatattcccgactgctccgatctgccgatttcggaagatgcggattatgtatatatctgcgagaacaataccatctacggcacgaagttccatacgctgcccaacaccaagggtaaggatctcgtggcagacgtttcttcgtgtttcctctccgagccggttgacatcacaaaatacgcggtcatgtacggtggcgcgcagaagaacatcggccccgccggcgtggtgatcgacatcatccgcgaggatctcattaccgatgacgtgcttgagggaacgccgaccatgctcaagtggaagacccaggccgatgccgactcgctgtacaacacgccgcccgcctacggcatttacatctgcggcaaggtgttcaaatggctgaaggatcagggcggtctcgaggccatcggcaagcgcaacgaggagaaggcggcgatcctctacgactacctcgatcagagcaagcttttcaagggtacggttcgcaaggaggaccgctcgctcatgaacgttccgttcgtcaccggatccgatgagctcgatgcggcgttcgtggccgaggcgaaggaagcggggcttgtgaacctcaagggccatcgcagcgtgggcggcatgcgtgcgagtatctacaacgccatgccgaaagcgggcgtcgagaagcttgtcgagttcatggacggcttcgagaaggcgcacgcgtaagcgaaatgcgctaacaggcagacgaaatcttgtcggggcggcaacctttaaggtagccgccccgcgttttaccgtgcggcttgcccgcgcaggacctgcttcccgtctctgcttagaagcggtcgatcgggacggtcgaacggctttgcgggacgggtgggcggcgtgcttgcgatttggtttcgaattccggatatggttttgcgtcgtgtgccgttttacgcggaactcgccggtttcggtgcggtagaatgcaagctcgtgaaaagactgcaacgggcttgagcctttttaggcgaaacgacagcggtaaggaaggaagagtggttgccgttatggcgaagaaggtgctggttaccgagaagcttgcagaagcgggcctcgatattctgcgcagcaagggctacgaggtcgatgttttgctcgagctggatcccgaaggcctcgtcgatgcgatacccgcatacgacgcgctcatcgttcgcagcgccacgaaggtgactcgcgaagtcatcgaagccgccgccaacctgagggtcatcggccgtgcgggcgtaggcatcgataacgtcgatgtcgaggcggctaccgagcgcggcgttatcgtatgcaacgcgcccacatcaaacatcgtttccgccgcagagcagaccatgtgcctgatgctcgcctgcgcacgcaaaacgccgcaagcggttgcatccatgaaggacggaaagtgggagcgttcgaagttcagcggcaccgagcttttcgagaagacgcttgccatattcggactcggccgtgtcggcggacttgtggccgaacgcgcccgcgcgttcgggatgaaccttatcggctacgatccgtactgcagccccgaacgggccgagcagcttggagtcgagctgtacgacaacgttgacgacatcgtgccgttggccgatttcattacggtgcacctacccaaaaccaaggagaccatcgggatgttcgggcccgcccaatacgccgccatgaaggatggcgtcatcctcgtgaacacggctcgcggcggcatctacaacatcgaatcgttggcggatttcgtggctgcgggcaaaatcggcggcgcggcgatagacgtgtacgaggccgagccttgcacggaaagcccattgcatgagttcgataacgttatcctgacgccccacttgggcgcttccaccaaggaagcccagacgcgcgccggcatccagatcgccgagtacgtgtcggcgggccttgagggctccatcgtccccacagcggtcaacatggcgcttgtaccgcccgagatcatggatgcggtgggcccctatgtgcccgcttgtcagcttatgggctcgatgctcgcccagatcgacggtgatattccgcagtatttgaagcttacggctgcgggttcgctcgctggagccgatccttcgattctcgtcgcgggtacgctcggcggcattctttcctacaagaacgtggcggttacacccgtcaacgccgaagctgtggcgaagcgtcacggtatcaaagtcgagacgcaatcgcgccccgatgcgcaggggtacgcttctgcagtttcggttgtggcagacggcaccgagatatcctgtacgcttgccgataccgcccaggttccgcgcatcgtttctctgttcggctaccagatcgacatcgcgcccgcatcgcaatcgcttatcttcgagtacgtggatgccccgggtaaaatcggtaccatcggcaccatactcggctcggccggcatcaacatcaccacgatgcaggtgggcatgaaagagaaggagaagaacgcgctcgtgtacatgaacgtcgaaggcgatgtcgacgatgccatcatgggcaagctgcgcgaaggattgggcgagctcaagaacctttggtacgtgaagctgtagggccaaaggcgacgaaagggaatccggagcccgctcaagcgacgcgcgggctcttttcgcagggtgctcgacgctgttggcgactgatgctcgggcgtcatgcgggttgtgctgccgtgctgcaaccgcaagccgttgggagcggcgcgccgttcgggttcccgtcgcttctgcgccatcgatggcgatgccgtgatgaaacaggtgccttgttgagaattccgaggtgaaatcccttatgtttgctatgattatcgaagtaatgttgagcgaatagaaagggcagctcatgacacgcaagatccagatcttcgatacgacgctgcgcgacggcgaacaatcgcctggcgcatccatgaacacggaagagaagttggttgttgcgcgtcagctacttaggctcaacgtggatgtgatcgaggcgggatttccgatttcgagtccgggcgatttcgaaagcgtccgccgcatcgccgaattggcaggcgatcaggcgacggtctgcgcgctcacccgggcggtcgaaaaggatatcgattcggcggccgacgcgctcaagtactgcaagcgccctcgcatccatacgggcatcggcgtgagcccgagtcatttgcaggacaagctgcgaatctccgaagaggagtgcctcaagcgcacggcccattgcgtcagctatgcgaagcagtacgtcgaagacgtgcagttctacgccgaagacgccggtcgatccgattacgatttcctcgtgcgcgttatccaaactgccatcgataacggcgcgacggtcgtgaacatccccgacaccacgggctattcgctgcctgaggaattcgggcgccgcatcaagtaccttatggacaacgtaaacgggatcgagaacgtaaccgtggcagtgcattgccacaacgatctcggcatggcgacggcgcttgcgatggaaggcgttaaaaacggcgcgacgcagatcgagtgcaccatcaacggcctcggagagcgtgcaggcaacaccgccatggaagaggttgtcatggcgatcaagatgcacgaacaggagcttgacgcccataccgatgtaaacacgcgcgaattcttgaaggcaagccgcctcgtatcctcgatcacaggtatgagcgtgcaggcaaacaaggcgatcgtcggcgccaacgccttcgcccactcgtcgggcatccatcaggatggcgtgctcaaaaagcgcgatacttacgaaatcatcgatccggccgatgtgggtgcggggcagagccagatagtccttacggctcgcagcggccatgcggcgctcaagcaccgccttgaagagctcggctacgacctcgagggcgaggcactcgatcaggtgtacggagcgtttctcgatctggccgataagaagaaggaagtgtacgacgaggatcttgaaagcctcgtcaatgagcgtgatcgtaacgaaaacgcgatttacgtgcttgaaggcgtgcagatcagctgcgggttcccgctcacgccgaccgcaacggtcacactgcgcaatcaggccgaccaggtggtcaccgcctgcgagttcggcacgggcccgatcgatgcgatgtgcaaggccatcgacaagatcgtacaggttgacaatgacctcaccgaattcgcagtgcagtcggttacgcgcggcatcgatgcgctcggcgaagtgaccatccgcgtgaccgatcccgaaggtgccatttacacgggtcgcggctccgacggcgacatcgtcgtgtcgtcgaccaaagcgtatctcaatgctttgaatcgcctgttgaacgacaagaaggagcatcgcaggtagggtttgttcgacaaggctgcgaaggtgcggtttcgcttgcttgcgcaacggaaccgcaccttctttgcaatgccggtgtcgcaggattgcgcttcctcagatacttgccttgtactgaggcaattcgagtagtttttcgtacatcgccacatatacgtcaggcctgaagtccggctctccttcgtcccaaagctttgcgaggaacggcttcgaagcgtacgagaggtcaatggtgcccaggtacatctcctgctcgtcgttgcccgctttgccgaagggccttccggcataataatgaatctcaggtacgtttttgcccggtcctactacattcgcgccgccgacgaaatcgttcgctcgatgatggcccgtgcaattagcggaggcgatgaaaatggcgttgttcgctgcttggtactcgattgcatctctgatgttacgtgccgttacgcttgaatcgaccgcgcaggggttgaggtggagcctgcagccgttcgcacgataaaagcgcatgatttcgttgaatacaaaggtgtcgtagcagatggcgatgcctattttaccccaaggagtgtcgatcataagcggttcgctcccgcgagtcgcccagagtggttcggcggcgggaaggtgcatcttgcgatagcttctggttacgcttccgtcggggcatgcgacggcagcagcgttgtagacaaccccgttttcagcccgctccgcaaggccgaaaacaacgtagatgccgtgcttttccgcgattttcgccagggcgagcgacgaaggtccgggaacgggctctgcgaggcggtgatgcatttgctctgctccggtgctttcgggatcaaggtcatagccgatgagcgcggtttcgggaaagagaacgatatcggcgcctcgttttgctgcgcattcggtgaatccgatcatgcggttgagatttttcattttgtcgccccacgtgggctcgtagcttacgacggcgagcgtcaatacgtcttgcatcatgtgatggctcctggttctttaaggattttcaggttgatcggctgctagcgaagctttggcgttgcgaacgtgcatacggcgcctacgacggtcaaaggaacgagcgtatagaacatcgcatcccagcccagcgcctcgataagcaagccgacgatgctcgagctgaggaagatgccgatccattgaaacgtgttaagaagggcgacggccatattgccgtgttgcggttcgaccagctctgctgcggccgagaagcatagcccgacgattcccataaccgcgacgccgaacatcacgacgagtacgaggaacaatgcggtgggaaaagtcggcataagcgcatatgtgacggcgcttgcgagcatgaggatgccgagcggctttttccttgaaccgattttgtccgaaatcgcaccggtaacgatgccgactgggataccgataagcggtgcgatgctcaccatggatccggcggaagctgtgtccatgccgcgtacctcggaaaggtacgtcgggaggaacgagatgacgccttgctcggcaatcaggtagatcatgagcgtaacgccgataagccatattccctttgaggcgaatacggttttggggaacagcatggttttccccgtggagttgtcggtttcgcactcgagtgccgaatcgaggtctcgcagcgcaatggcccagacggcgaggaatgcaagtgcgtaaacggccgtaaaccaccagacgctttcccacgtgctggattcggccatacgcggagcgaggttgaacatggctatctgtccgaatgccatgaaacacatgagcaggcccattgctgagccgcgttttgcattggagtacacacggccaacggcggcggggccgagcgtcatgagcaagataaggccgatgccttcgacgatgcggctggcgagcatgatcgcgtagcctggatcaaaagcgcctgcgaccgatcccgcaagtgttgcggttagggctgcgagacctgttttgtagtaaccgaatcttgtgatgatcacgccgcttggaatggccaaaaagattcccgaaaacacgaacgccgacatgagcaagcccacctggcccgtaccggtaagccccatgctttcagcgagaaacggtacgatcggtgctactttgttaaggcacattgccccagccgtcatcgacatcagcatcatgaacaacacaagtcccggcgatacgcttttcttcgcgtgccgcctcgaatcatttttttccatccgaacctccttgttggtccatctctagtccttgcagtaccaaaaccatagtcgcgtggtgcagcgcttgggaatgaacgatttggggagcccctgcaatagttatttgagggcgatgtgcggaccgtcttcattctgtatgctgcaataacgggatggagccgcttttatcaaggtgctggatcggggcatgccggcatgtatccgaacgatgcggggcgaagcgtatggacacaagagatctcgatgttttcattgcggtttacgaagcgaaaagtatcagcaaggcagcaaaagagcggtttttgagtccgcaggggtgcagtaagatcatccagaagctcgaacatgagcttgaagtcatgctgttcgcccgccatcattggggagtgaagccgacgccgcatggcgacgtgctgtaccagcgcgccaaaacggtcatcgatgcgcttgagggcgttcgggctgacatcggcaaggcgaaggcgctgaaaacgacgctgaacgttgcgtcaactcagggaatatcagcttacctaaccagggctttcatgaaggagttctctgcaggccatccattgacgagtcttcgtatgatcgaaagccccgattccattgtgaaggcgcgcctcgacagtcgtgaggccgagctggggatattgggaggtcccgtagatttttcgatgtatcggtcgatgccgttcacccggcatcgaccctgccttgtcattcatcgggaaaaccccctcgcggcgaaaccctatatttccttctccgacctcgatatgcagccgcttgcactcataagcagggaattcgcctctcatcaccttatcgtaaaccgcttgcaaaacgcggatgtgcatcccgatatcgtcatggaggcaaccgagctcgattattgccatcggcttgccgaggagaacgaggcaattgccgtatcctacgattttgcagcatggggaagcgtacggaaggatacggttgtcaggccttttgaggatcggtctttcgtgtgggagacgtttctcgcgtatcggcaggaagccgagttgacagcccatgctcgtgcatactgccgtttcgcccttgactgggttgagcggcatcgcgggtatctgtttgcttggccgcagggcgatcaagcgatggacggaagccgctgttgacggttctcttcggtattgggcgacctcaagtgggattgagttgccgccagccggaatcgattgtctggaataggggagagccgcccgagcaaacggttggcgccatcctgcgaacggcatatatgatactacctatgtgccgtttacgtggcattcgtaacggttcgccctcgcatcacggcatatcctcaaacggggtgtatggtttgcctaacagctggattccagctaggcagagcgtgcttctgcgcgcagacgtacgaaaggattccgtatgaacaaccctgctcagagctcctatcaactctatatcggtggcaaatgggtcgactcttccgatgggaagaaactcgacgtttattgtcccgcaaacggcgagaaactctccgagatcgcagatgccacgcgcgaggatgtcgaccgtgcggttgacgtcgcctgggaggcttttgcgtcgtggggcaagaccaccaaggcggagcgtgcgatcatcctgaacaaggttgccgatatcatcgaagagaacgccgagcatttcgctatgctcgagacgcttgacaacggaaagccgatccgcgagacccgcgccatcgacgttgcctactccgtcgatcacttccgctactttgcgggcgtgcttttggctgataccggtgaggccgatatgcttcccggcaatatgatgtcgctcgtgctccatgagcccatcggcgtcgtcggccaaatcgtgccatggaacttcccgttccttatggcggcgtggaagctcgcccccgtactcgctgcgggtgactgcacggtgttcaagccttcctcgacgacatcgcttaccgttctcgagcttgccaagctcacccaggatgtcattcccgcaggcgtgttcaacgtggttacgggtcgcggttcgaaatcggggcagtacatcctcgagaaccagaagatatccaagctcgccttcaccggttcgaccgaggtcggccgcgacgttgcccgcgctgcggcggagcgcctgattcccgcaacgctcgagctgggcggcaaatccgcgaacataatcttcccggatgcgaagtgggatatgatgctcgacggcattcagctcggcatcctgttcaatcagggccaggtgtgctgtgccggcagccgtatcttcgtgcacgaggatatttacgataaattcgtcgaagatgccgtgcatgcgttcgagaacgtgaaggtgggccttccgtgggaggacgatacgcagatgggcagccagatcgacgaaggtcagatgaacaagatcctcgactacatccaaatcgcgaaggacgagggcggtaaggttctggttggcggcgagcgcgccactgaaggcgatcttgccaaaggcgccttcctcaagccgacgcttctcgaggttccgaacaattcgtgccgcgttgcccaagaagagatcttcgggccggtggccgtggttatcaagttcaaagacgagcaggaagtcatcgacatggccaacgactcggtctatggcctcggcggtgccgtatggacgcgcgacatcaaccgcgcgttccgcgtggcgcaaggcgtgcagaccggccgcatgtgggtgaacacttacaaccagattccttcgggcgcgccgttcggcggctacaaggaatccggcatcggccgcgaaacccacaagatcatgctcgagcactacacgcagaccaagaacatcatgatcaacctgagcgaggaaccgagcggcttctatccggcgaagtagccctcgtctgaaaccgcgcgttcgctaagcgcgcaaccgcgtgccggccttcgggtcggcacgcgtgcgttcggggccgtttgcgggaggcagcgcgcgaacggatggcgcttgcgacgagccccacgttaggttttcgggcgggccccttgcgcccgcccgcgcatccggatgcgctagccgccgatcagagccaggtattcttcgaggcaaacgccgagttcgcggatctcctcggcgacctctctgccgacgtagcggtagtgccacggctcgtagatgatgccggtcacggcgcttttcccagtggggtagcgcagaatgaacccgaactttccgcagtgttcgataagccattgctggacgggcgtgttcgcttgggtctcgtcgaggttctggttgttgagatcgacgatgtcgagcgcaaagccgagctggtgctcgctcgcgcctggcacggcaaccgatttccccgcctccgcccgcgcgtcctcaagcgaaagacctgcggcgaggcctttttgcacgttgttggcgaaaaggccttcctgcacttccttcgagcggtacgccgagcagatgaggggggagagccctgcttcgcggcaggcgtccatcatggacatcgcctcggctgtgcagcgctcgtctgcatagaagccctgttcgaggggcgcgagtgcgggctcgtatccttcggggagcgggttttccgcgttgacgagcacgaggctccaatcgttcggggatccgttgtacgtgcgggcgggcgatgcggcgtcaaccggcaggtccgtttgccggaggtcgcctgcatcggctgtttctggtgatgatgttgcgtttgaccctgcgggcggcgcgctgccgatcactcggctagccgtggcgaccgcgcagccggcggcgagaagcgcgcctgctaaaaaccctctgcgggtgatggagcggccttgtgcgctgcggtagcgaactcgttttgtcggacccatggaaaccgcctttctctttcagtatcgctaccgtaagagagcggtttatcaggacggcatcgcgagggcatcgttttgccatccgaggttgaaaaggagcgttccttccatcagcagggcgggagccgtgtacgatgcggccgtgttttcgtcggtccgtttgagctcgatcgcgtattcgctcgagagttcgtcgtagagcccgatgctcgcttcagcggaatcgatttcgccgttttcgcggtagtaggagagcagggattcgatctcttcgggcaagccgtcttccgatacgacgagcgtcgtgttgccggtctgcagaaaaaacgcgaccgcctttccgctcgcatcgtcgatccagacgctttcctgcgcgtcgccggcgctctggtttcccgtgcagatccagacgatgcccgaaggtgcgcctgtgctcgtaccggtgatgaggaccggcgatgcgtgcgcgctgtccggcgcgaaaggtttcgcgccgactgcgtcgatcagctcttcggcggcttgcagcgctccttcctcatcaaggcggacgccttcggcgagctccacttccgaggggctggatccgaacagatccaacatctgcaaaagatcggccgtctcgcctagcgcaagggcggcggcaccgttgtcgcgctcggtgctttcctgctcgagctgccggtcgagcgcattcacggcaagcccgggaagagccgcgccaagcgcgacgagcgctgccgtgcaaagcaccgccgcaaccgatgccatccgtttcatgccgcacctcctttgagccagaccgtgacgatcgttcctttgccgacggagcttgcgaagcgcatgcttccgttgtggagcgcgacgatctcgcggcagagcgcgagcccgaggccgacgccgccttggctgcgggagcgcgatttgtcgacgcggtagaacgcctccgtgaggtgggcgagggcttcgggagggatcccgcgcccggtgtcgccgatcgcgatcctgcagccgtcgggggccatggcaacgcgcacggagagcgtgccgcctgcctcgttcatcgccttgcgcgcgttgtcgcagaggttcacgagcagcgaggcgaccaggtcggcttccagaaggcaggtcccttcttcgcattcgcagacgagtgcgattccctgttcggcgtagatcggcgcgagccgccccgtcagctcctcgacgatcgaggcggggcttgccggcgcgagggcgatgctctgcccgtgcaagacgagcaggtcgagaagcttgcccgaaaggctttcgagccgctttccctcggtgaagatatagcgtgcggcttcggtcagctcgtccggttcgagcgcttgtttctgtatcaggtcggcgtagccgatgatggatgtcatcggggttttgacctcgtgcgcgaaactgcccgtgaacaggttctgccgttccgctgcatcctcgagctctgcgatggtcgattcgagggcatcggccatctcgttgaaatcccgcgcgacccggccgatctcgtcgcgcgaagcgatgttcgcacggctcgacaagcgtccggccgcgatggagcgggaggtgcgggacaggtcgacgagcggggcggtgagcacccgggcgaccgtgtaggatagaagggcgcagaggacgaccattaggagaaacacctgttgaaacgtctgctgctgcgcgtcgcgcgcctcgatgagggccgagacgtcgcgcgtcatgtccagatagagcgtcttgccgctggtctcgagtgcgccggaaagcaccacggcatgctctcccgaggcgggtgtttcgtagcggatcgtgcaggtgcccgcttccgggtacgtgccgaaatgtctggaatgcaggctcgcgccgtgctcgtagagagtgttttcggccgtcgcgaggcgcaagaacgtccatccgttgcggttttgctcggtgagctgtttgagcgtgcgggctatgtcgtcatcgcttaaactgccgttcacgtcgtcgacgaccgtgagggttccgatcaccatctgataggctccgtatgcggcctcctgctcctgctcgagcgagctttggaaggagagggcgacaagcaggcttccgccgatgccgaagagcaccgacaaaagccccaccatgcaaagcgtgatcttcaggcggaaggtcatcttatgcctcgagccggtagccgaccttgttgacggcgcgcagatcgtcctcccagccgaccttcttgcgcaaccgctgcacgtggaggtcgaccgttttgctgccgtagcggtacggctcgccccatacccgctcgtatattgtctcgcgggaaagggcgcgcccacggttctgggagaacaggacggcgaggtcgaattcctttttcgtcaagccaacctcttcgccgcctttgcgcacacacatggcgcaggtgtcgatttcgaggtcgccgatcgttgtgacggcgtcgcttcttttgcagcggcgcagcaccacgtcgacccgcgcgagcagctcggcgatctcgaacggcttgacgatgtagtcttcggcaccggctttgagtccgcggacccgctcgtcgagcgcgcctttcgccgtgatgaagatgacggggatgtccttaggcgctatgaagtccatgagtgcgtagccgtcgatttccggcagcatgatgtcgagcagcaccaagtcgaagcgttcgcgctcgatgatgtcggccgcgtacgccccgtcgggggcgcatatgcagacgtagcctgccttcgagaggctcaggcgcagcaggttcgaaatgggcggttcgtcttcgacaatgaggatttttaccacgaaacacctcctgatgacacgatacctcgtttcggcatcgaaacggcaaacatcctgaaaccgcgcaggtttttggcgtccgtccggccggacttctggatttcggcctcgcgcgcggttccgtctgggagctcgcggcgcttttcgccggaaaaggagtcagaccagacctgcctgtagctcgggatttcatcggatcataccgaaaccggaagcgaatcaacgctgttccttacacggaacgacactgggggagaaccggagtaacaccagatcatacactgtgaaaatagtcgaaacagtgcggtcgcagccgtgctatcctgcgcgcatggacatcgtgctgtcgcatacaacggccttggaattctggcgcttgaaacgctcttcgacgtttgcgcgcgtgcgcccgaaggggatttccgtcttgccgtcgtgtgctccttccgccgcggaaatcgaggcattgcccctgcggttggaatgggttcccctcgcgcctttccacgtgctggtgaaagaagccgccgcccgccgccgtggcaagcggatgacggctcacgtttgcagttcgtctttgcctgaaggatcccttgtcaaggttgccgaaggcgtattcgtctgctctcccgagttgtgctttcagcagcttgcgagcgttcggtctttctcccgtctcgtcgaaatcgggttcgagttctgcgggtcctacagccgctattcgggaagaaccggattctacgagcggcgcccgcttacgaacgtcaaggcgatcgaacgcctcctgagaaagacggtggggacgaaaggaagcaccctcgccgccaatgcgcttcggcatgttctcgagggatcctggtccccgatggaaacgatcatgacgatgcttttgtgccttcccatgaagaaaggaggatacggtctgccgacgccttcgatgaactatcggatcgacgtttcctccagcgctcggaagtttacgccgaaaggctacttcgtctgcgatgcctactgggcggcagcgaagctcgacgtcgagtacgacagcaacgagcaccatctgaagaggaaagagaaggcgaacgattcggcgcgtcgaaacgcgctttccgccatgggcatttccgttatcgtcgttacgtgggatcaggtggtcgtgcgccgatcgatggacgaagttgctagcagcattgcccggaagctgggaagacggctccgtttggaacgggtcagcggctcttgcgcacagctcgacctcaggcgcgagctcttaagctttgccgattggcgcacctgctcccggtagccccggacttcgccggtgaggccgcatcgtcggcggagtgcaaaagatgacgtcggcggtgcgcagtcgaccacacgtaaaagatgacgtcaacggcgggcggttgcggcgcgcaaagggtaaggagttagcgggacagaatcggggagaatgcgcgagtggtacgcgactgcctgcataagcggagaagagggcatcgctttgacctggtatagggaagatcagatagctgcaacgatatgatcttcggcgatcggacgaccgttcgggtgtacattttccttgattttgtccccaaagtaccttacctattttcatccttgggcttttgcggcgtacaggcgtcttgctgccttgcctgcttcttgtcgtcggtttgccattcatgggtttgccggcccgtggcgtttgcgaactgtggatttcccccgaagttgcgtcgctgtgcacgaaacaccttttcacgctgaaagaaatatgctataaatattgattgtccatgcacaggtcatatgcatgggcgataacatactttcgaacgttaggtgaaagtgggtttatcccgctttctttttatctgggaggtgacctgcatgttgaccgcaaaagaacgaagcttgctcgaagcgcttgagaagcaggctgccgagcatggtatcgaaatcgtgaccgtcgaagtcgtgggggcgaagaaatcgccgaccattcgcgtttatatagatacacccgagggcgtgagcttcgatgagctatcgaacgcccaggcgtggataaacgacatcatggacgaactcgacccgtttccgggcgcctacaccctagaggtgtcatcgcctggcatcgaccgaccgctgcgcacgctcgagcacttcgagcgctttgccggtgagaccgccgtcgtcacggccgttgagccgcagaacggacgcagcaaatggacgggcacgctcgcaggcgtgcgcggccaggcgatcgtcatcgatgtcgacggcgcgcaagaggagatcgagataggcaacatcaagcgagcccgccttaagggcgcggtggacttcggttcgtaggaaaggaaagcatcgtggcaagttcggaattgatcgaggccctgcaggcgctggctcatgagaggaagatagacgagttctatctcatcgagcgccttgaggcctctttggctaaaagctatcagcacatacttgatctggaatgggacgctcgcgtgacgatcgaccgatcgaccggtcagatctacgtgtacgagctcgttcccgtcggcgaacccgacgaggagaccggcgaatactcggagttcgaggagcgcgatgtgactcccgacgatgtgagccgcatcgctgcgcagaacgccaagggcgtcatttcttcgattgtccgcgaggcgggtcgccagagcatctacgaggaattctcgagccgcgtcggcgatctcgtgacgggcaccgtgctgcagggcactcccgatttcacgatcatcaagatacgcgacggcgtggaagccgagctcccgcactatgacctcaaacgcaatccgtccgagcgcaacgagcgtcctggaaacgagcactatcgtcataaccagcgcctcaagacgctgatcatcgatgtgcgcgatccgaattcggatgcacccaagatgcgtggcgagcaggcgcgtccctcgatcgtggtttcgcgcacccaccccgatctgatccgtcgccttttcgagatcgaagtgcctgaaatatacgatggcatggtggagatcaaatcgatcgcccgcgaaccgggagcgcgctcgaagatcgccgtatcatcgcgcgagcccaacctcgatccggtcggcgcatgcgtcggtccgaaaggctcgcgtgtgcgcatggtggtcgaagagcttcgcaacgagcgcgtcgacgtgatccaatgggatgagaatcctgctgtttacgtatccaacgccctttcgccggcgaaggtcacgcgggtgaccatcgacgatgacaaccactacgccaccgtcgttgttcccgacgaccagctgtcgctcgccataggcaaagagggtcaaaacgcccggctggccgctcggctgaccggatggcatatcgatatcaagagcgcgtcgttcgcgggcgagccgcctgcggtggacaacatgctcatcgacgaggatcttcccgctgacgaggagctcgtatgcgcccacgtcagcgaagatggcgtgcgctgccgcaaccatgcccgtccgggcagcaggtattgcggcatccatgcgggtgacgaagcgtaagcgggaagcgatggccgaggtgcagaacaagccgaaacgccagcgcagctgcatcgcctgcggcggcaaggcggccaaaggcgaactgtaccgcgtcgtgaaaacggctgcaggcgtcattgagttcgatgcgtcgggcaaggcggcgggcaggggggcgtacgtgtgctccgaagcctgcctcgaaaaggcggttgcatcgaaaaggctgggtcgggcgcttcgcgcgtcgctgaccgaagaggattacgaacgggtggccttggacgtgaagaaggcgatccgtggagctacaggatagaatgaggagaatgtatggccagcatgcgtgtacatgagttggcaaaagaattcggcatgtccagtaaggaactgctcgattggcttcaggagatgaaaatccctgcgaaaagccatgcgagcatgctcgccgatgcctatgttgccaagatcaggaagaatctggagcctgagataaagcaacgcaccggccagctcgaagataaagaggcggccgagcttgcggaagagcagcgtgcgctggccgagaggaaggccgaagaggagcgtaagcgccgcgaggccgtcgaagaggagcgcaagcgccgcgaggccgagcaagccgcacgtcgcatgggcggcctttcggagcagccttccgaagacgaaaaagattccgacagcgaagacgaatcgggagagcgtgccgcgcgtcccgcagcttcggcgttcgagcgtttggcgagccagatcgaaagcgagaaggagcgcgttgcccgcgaggccgaagaggcgaaagcgcgggcccgcgcggcagcggccgccaaggaggttgccaagaagcaggcggtcgccgaggcgcttgcggcacggaaatcgggcggcaagggcgcgaagcacagcgagccggccaagaaggcccccgtgctcggcgcgaagccgaaatcgtcgttcgattcgctgctttcgcagatcgaagccgagaaagcccgcatcgagcagcagaaggccgagcgacagaacgctcctcggcagggtgcggcgaacaatcagcgccaaaagccccagcgagccgacaagaagcagggtggcgcaaagccccaattccagtcgcaacagcaggccaagcgcacgttcgaacccgaggttcccgaactgaaccagcaggcgacaagcgaagaccgctacgctcagatggcggttcaggccgagaagctccagcgcgacaaagtgcttgccgaagcccgtgcggccgttgaagcggcgacgcaagaaggcgagggacgccgcaagaagcgcaaggagaagcgtgaagcggaaaaccgcgagcgtctggagatggaagccatcgagaagggactcgatcccacgctcgtgctcgacgattcggtcgtcgaggtgccccagggtgcgacggtttccaaattcgccgaactgctcggcgtgcagcccaacgacataatcaagcgcctgttcatgctcgggcaggtgctcacgctcacccagtcgatgggcgacgatctcatcgaactcatcgccgatgacatgggccgcaaggtgcgcgttgtgtctccggaagaagagtacgcggtcgtttaccatgatagcgaagaagatctgaagccgcgtccgccggttgtgaccgtcatgggccacgtcgaccacggcaagacctcgctgctcgacgcgatccgccataccggtgtcgccgagggcgaggcgggcggcatcacccagcatatcggcgcatcggttaccaatatcgacggccgccagatcacattcatcgatacgcccggccatgaggcgtttacggccatgcgcgcccgcggcgcccaggtgaccgacgtcatcgtgctcgtggttgccgccgacgacggcgtcatgccgcagaccatcgaggccatcaaccatgcgaaggcggccgaagtgccgatcgtcgtggcggtgaacaagattgacaagcccggagccaaccccgatcgagtgcgccaggagctcaccgagtacggcgtgatccccgaggagtggggcggcaccaacatgttcgtcgaagtttccgccaagcagaaacttcacattgacgatctgcttgagacgattctgcttcaggccgacgtgcttgaactcaaagcgaaccccgatacgcttgcatccggcttcgtcatcgaagcgaatctcgataaggggcggggccctgtggctacggtgctcgtgcatcgcggcaccctgcgccccggcgattccatcgttgcgggagcgtcttacggccgtgtccgtgcgctcgtgaatccgcgcggcacgcatgtcgacgaagcgtatccggccgacccggtcgagatcctcggtctcaactcggttccgactgcaggcgacgaattccgtgtgttcgaagacgagcgcgatgcccgcaagttggccgaggaacgcgctttgagggcgcgcctcgccgagcaggaaaccaagtcgcatatgagtctcgacgatctgttcagccgcatcgaggcgggcaagcagaccgacctgaacctcatcgtgaaggcggacgtgcagggttccatcgaagcgttgcgcgatgcgttcgacaagatggaccaatcggaggttcgcatcaacatcgtgcactcggcggtcggcggcatcaccgaaaccgacgttacgctggcttcggcatccgacgcgatcatcatcggcttcaacgtgcgcccgacgggcaagtcgaaactgcaagccgagaaggaaaaagtcgacattcgcctgtaccgcgtcatctaccaggcgatcgaggagatcaacgccgcccgcgtcggtctgctgtcgcccgatatcgtcgaagaggacaccggcatcgccgaagttcgcgagacgttcaaggtgcccaaagccggaacgatcgccggctgctacatcatcgagggcgagatttcgcgtgacgacaaggttcgcgtggtgcgcgacggcaccgtcgttttcgaaggcacgatcgattcgctgcgccgcttcaaagacgatgtcaaatcggttcgcagcggatacgaatgcggtatcggcatcaccggttaccaggatatcaagatcggcgatacgatcgaaggttacaagatcgtggaagtcgagcgtaccgagtaagttcggcacgagaagcgttaccatgtaccgatggctcggagttcgcttgccgggccatcggtttttcccataacctcttctttcgaaaggagatggatgccatgaagcagagttcatccaacaggaaggtgaacgagcaggcgagagaggtcatcgcgagcattcttctgttcgagatatccgacccgcgtctgaccctcgttacgatcacgggctgcgaagtgagctacgatcgcagcgtctgcaacgtatactacacaaccgagccggagcgctacgaagccgttgccgacgcattcgccaaggcggcgggccgcattcgctcgcttatggcaaaggagctttcgtggcgcgttgcgcccgagctgcgcttcatgctcgataagagcgtcgacgaagcggagcgtatcgcgactgccctgcagcgcgacgccgcgcgcaatgcagcgagcgagcgggccgatgccggcgaagagatcgatggcgacacctgcgatgcgggggatgaatagcgtggctgtgacgtcgcagacgaatgccgatctggccgcaatagcagaggtgctgcgcggtgccgagagttttgccgtgtgcggccatgtgggacccgacggcgattgcctcggatcgcagcttgccgtgtaccacgctctgagggctttgggaaagaacgtgacctgcctgcttgcaaaggccgacccgatcgagaccggactgctttttttgccgggggtagacgatatggtcgttgcggccgactacgacgggaagcccgatgtgttcgttgcgctcgatgtgccaaccgtcgagcgcatcggagacgatgcggcggccgtgcaggcggcatgtcctgttacggtcacgatcgaccaccatgcaagcgaaacgaccatgtcggcctacacgtacgtcgatcccgatgcggccgctacggccatgctggtttgggagcttgcggcgcttctcggcgtcgagcgcacgcccgaaatcgcgacgtgcgcctacacgggcctcgttaccgatacggggcgcttccaattccaaaataccgataaggccgccttcgcttccgcgttcgagatggtggcggcgggagccgatccggcagccgttgcccgcgaggtgttccagaaccgctctgtcgcttcgctcgaacttgagcgcatcatgctgtcccgaatgcgatcctcattcggcggggcttacgtgtcgagctatctgacgcacgccgatttcgacgaggtcggcgcggtgaaaaccgatgccgagccgcttatcaacaccattcgcgccataacgggagttcgcgtagcttgcatcctgcgcgaggaacccgagcacattcgcggcagcttccgcgcaaaggacgatacggatgtggcggcaatcgctaacacgatgggcggcggcggacacagagccgcagctggtttcacgcttcgcgagccgctcgaccaggcgataaaacgcgtcgacgccgccgtcgccgcagcgctcggtgtggacgatgacgaacgttgtgcggaggcttgcggccagacggaggcggcgcgggttgccgatgcatcgaatacggaggctgttcgtctgtgaaacgcggtgcatcggggctttccctagtcgtaggaatcaacaaaccggccggcatgagttctcacgacgtggtgaaccgctgccggcgtattttcggcgagcgccgggtagggcacaccgggactctcgaccctttggcaaaaggcgcgctgctcatctgcgtcggcccggcgaccaggctcgactcgtatcttaccgagcacgacaagcgctaccgctttcgcgtatcgttcggcatcggaaccgataccgacgatgcgggcggtgaagtcatcaaacggggcgatgctcccgtttgcgtgctcgacgacgagtatgcagaacggttcgtcgctgcgctcgtcggcaagcacaagctgatgccgccggtgtactcggccatcaaggtcgatggcgaacgttcgtacaaagcggcgcgcgagggaaagatcatcgatctggctccgcgcgatatcgagatttacgaagcggagctcgagcgcgttgttgcggcaggcgaagacggccttcccgcatgggatgtctccgtgtgggtttcgaagggcacttacatccgctcgcttgctcgtgatatcggcaacatgatagggtgtcctgcatacgtcagcatgctcgagcggacatgcgcaggcgcgctcgatctggccgagtgcgtgacgctcgagatgcttgagaagcgcggtgaagcggcggcactcgatccggtaaggcttttgggattccgattcctgttcgcagacggcaatgttgccgctgcggtgtccaacggctcgcttcttcccgctgagagctgtacggtattcgagcgaaggcgggccggtatcgcggctgagctgtgcgcatgcacggcaggcgtcaggcagagtgaaaaaccgttaacgtccggcgaggttatctcggtgatcgccgagaacaagctggttgcactgtacgagtacgatggaatgcgcaacgcgttgaagccgcggtgcgtgttcgctatgggggtatcacgtggcagagatttttaaatgtgacgagatgttcgaccattcgttctttacacggtcgtcgtgcgcgttcggcgtgttcgacggagtgcatcgcggccatcagtacctgctttcctgcgcgcaggaaacagcgcgcaaaaacgggggagcgagcgtggcgctcacgttcgacatcgatcccgacgaggtattccatcccgaacgccttaaaaagctcatgaccaacgaggagcgtatcaagacgctttcggaaagcggggtcgacgcggtggtcgtgctgccgttcacgcagcgcttctcggcatcgagccccgaagaatttctcctgaacaccttcaacggccatgccccttcgtatctgcacgtcgggtacgacttcaggttcggcgcgcgggcgaagggcacggtcaaggagctcgcaaactgggctcgggatgtcggaacggaagtatgcgcccatgatctgaaaagcgctgacggggcacctattacggcgacgcgcatccggctgcttctgggcgacaacgacatcatcgaagccaacaagctgttgggcaggccgtattatctggtcggtaccgtgcagcaaggccggggcgagggtcaggagttcgggttcaggacggcgaatctcaaggtttcctctcagctccaggcgttgggagccggcgtatacggagcctatgcgcacgtcgatgggatgcgctacaaagccgccgtgtcggtgggcgtctccccggtgttcgccgataagacggacgcaacgtgcgaagcccatctgctggatttcgagggcgatctgtacggcaaggcgatcaaggtcgaattcctccactttctgcgccccatgatcaagttcgagaccatcgacgagctcatcgccaccgtcaacggcaatattgcttgggtcaggggaaacatgtaagatcgggcgcaccgcacccggtttccagcgtcgcggccggcaacaacgcgatccgaggttcggatgcacggtgtgcggttttctacgatccgaacaggatgtcgtactgaacgatcgccattcgggcaagagcggccgatgcttcgtcggcgggatcgtcgtggcgttcgtcgatccagcgccacgttccctgcgcgtcgaggtatccgttgatgttgacggctggaaggacggcctgcgagtcgagcaggaagctgtggtagggatcaagtggaagccccgctgcggcaatcatgtgcgccccaaggtagttgaggctcatatcggtcgaatcgggatagaggggccgttcgagctgttccaggtcgggttcggtggattccgcaaggagcgaaccgcttcgtgctggtgcttcgcttgtttcgaaattggtccaaatgaggtagggtacctcgtagcgggcctgtacttccccaagcgtgaaatctgcgacatccttgtcgaaggcgaggcttgacagccaatcggagaaacccggttgatggtcgccgaacaggcacagcaccacgggccgatcgagttttgcgagcgattcgatcaggtattgcagatcgaggtcggattgcctgatgcagctcgcaaattcctcgagctcgtcggtgcgatccgaatcgagcggtacctcgagggccatttcgtcggggatgagccccttgtcgtagccgccgtggttctgcagcgttacgtcgaagatgaattgcggcgcgtcgctttggcctatcagctgcaggatggcatcgtaggttgccttgtcggtcgtgaagccccgcagcgtatcggcgccctcgaaggccgtgacgtcgaggaaccggtcgaatcccagctgtcggtagacggtatcgcgtcgccaattggtcgcatcggccggatggatcgccgtggtttcgtacccgagcgatttgaaataggttgcaagattgtccgtgccgtcgagatcgtagagcatgtaggggtagacgccggcgccgaggtttcccatgctcgttgccgtgaggaattcgaattcgctgttgcaggtgcctgctcccagcgccgatgcgtaagcggtgcctttgagataggcatcggatatggaattgaaatactcgggtccgtcgtaggcgtccgacaggttggggtagcgcgaaaggtccgaaaacgtctagttcatgatggcgattacgatgggcttttcctcgtcggggatatcggcgcgagagccgtcctcgctttcgtaggcggcgaggatttcggcggcggcagcgctcgaatatccgtccggctcggcgggattgagatcctgcatccgtttcaggaagcagagaacggagccctgttgggcataagaatccgacgcggcccatccgtcaacctggcagccgtaggctttttctatgtcgaaattggaaaaccagaatccgaacgcgaccacgcacgctgccgcaacggcggcgttggccgcgctccgcttgacggcgaacttcgttttcggaagaaacaaaaccaaagcgatgccgcaggccaaggcagtgaaggcaatagcgacgctgtcgttgacggcgtaggtgtatccgccgcccaccgcagccgctgtactcagcgcgaacagatcggctggaaggacgggctgtcccttgaatgcgatgacgaagtaatttgcagtgccggcgatgaagcaggcggcgagaaacgcgatcgccgccgttttcgtctgctgaccggcgaaatagacgatgcagaacaagacggcgatgacgcagaggttgacgaaggtgtagtatgcgccgatgtcgaaaagcgccgggttgtagggcttttcgaacaagtagaaggcgagaagcacgagtgcgccgagcacgaagggtttcgcgcgcacgacgatgcgctcgtatcggccgagaactcgaggtcgaagcgccagcgcggcaatgagcgctacgaatacggcgatgaccgaaggcgtcgtccaggagctctcgtgaatgacgaaacctgcggcatcgaacgcgcagtaagcggcaagaaggacgaagaacgagacgacgctcgctttggtggccttgtcccatggtgccgtgagggacttgatgcattccatgatgtgcgaaactccaacgtatcgacagtgcgcggtcgagcttaagcgctgcggtaatctattactatatccgtttcgattatagcagattcgagtacagcctcatccgaacaccgcaaacggcgcctgcgtatcatcttgagggagtaggtgtgtgcggtaatccgcccgctattcgccgcgtcgggctcccgcgcggtcgaaaaatgccccgttgtcagttcccgagcaggtgcaaataccctagaatgggcagagtgcattcttccggcctcgatgcccggcccgaagaatccatgaaactgtaagacaaatcaaggaggaacaagtgaccgtccaagtcgcatggatggcccccatctgcgctctcataggcatatgcatggcgggctacctcgggtcgtgggttctgaaacaagatcccggtccggaaaagatgaacaacatctcgctgaagatccagcagggtgcgaaggcgtttctgatgagcgagtacaagctgctcgtcatcttcatggttatcgtggccgtcgttatggccgtggccctctcgccgatcacggccgtggcattcgtcacgggcggaatcctttcggcgcttgcgggttatatcggcatgcacgttgccacgcgcgccaatacccgtactgcgtatgcagctgaggaaagcgttgccaaagccttgaacatttcgttcaaatcgggcttgaccatggggctttccgtcgcttcgtttgcgttgctcggcctttcgctgtggcttttgctgcttgtgttcggagtcgacacgttcgatctcatgcacgagcatgtgggcatggtcgagggctttgcgaccggcgcctcggcggttgctcttttcgcccgcgtcggcggcggcatctacactaaagctgccgatgtcggagccgacctcgtgggcaaagtcgaagcgggcattcccgaagacgaccctcgcaaccctgcgaccatcgccgacaacgtgggggacaatgtgggagacgtggccggcatgggcgccgacctgttcgagtcctacaccggctctattcttgctccgaccatcctcgcggtgacctttggcgcactcggttacttcggcgcggtgggcaccgtcgatgcgacgtgggccgtcgtcgtcccgttgatgatcgctgcgtgcggcatcatcacgtcgatcatcggactgttcgcggttcgcaccaaggaaggctccgagctgcacaaggcgctcaatcgcggcacctacgtggctgccggcatcgaaatcatcgccatcttcgtgatcttcttcatctggaacggccagagcgcgaaccagcccatctggctgttcggatcggttctctgcggcctcgtcgcaggtctgcttatcggcaagacgaccgagtacttctgctcggatcattacaagcccgtccatcagatcgccgaggcgtctgaaacgggtcccgccaccaacatcattcagggcctttcgacgggcatgctctccacgatcatcccgatcctgctcgttgcattcgccatcatcggcgcctacgcatgcggcaacatggcgttcgccaacatcgtgacccccgagggcggcattgcggtcggcctgttcggcgttgcgctcgccgcgaccggcatgctttccaacaccgccatcaccgtcggcgtggatgcttacggccccgttgccgacaacgcgggcggcatcgccgaaatggccggccttcccgaagaagtgcgcgaacgcaccgactcgctcgatgcggtcggcaacacgactgccgcaatcgccaagggcttcgcgatcgcaagcgcgggcctgtccgccatctcgctgttcgtctcctatcaggcgaccatgcatcattcgattccgaacttcgagctcacgctcacggatccgctcatcatcgcaggcatcttcatcggtgcgatgataccgttcatgttcgctgctttgacgatgggcgccgtatcccgtgctgcccatgcgatggtcgaagaggttcgccgtcaattccgggaaatcaagggcatcatggagttcaaggccgagcccgagtacgacaagtgcgtggccatctccaccaattcggcattgcgcgagatgatgctcccgggcattctcgccatcgtgatccctgtggtcatcgggtgcttcaacccggctatgctcggcggctttttggccggtgccgtggcaacgggcatgctgctcgcgatcttcatgtcgaatgcgggcggtgcgtgggataacgccaagaagtacatcgagggcggcgcgcatggcggcaagggctcggaggcccataaggccgccgttgtcggcgacaccgtcggcgatccgttcaaggatacgtccggtccgtcgatgaacatcctcatcaaccttatgactatagtgtccctgacgttcaccccgctgttcatcgccatccagacgatgctgtagggcgttcgcatccgccgaagcacgcttgcgcccagcggatgcgcatctgcgccaagcgtttgcgcgtgcaagaagaaacggctcggagccttcgcggttccgagccgttttcctgtggcgagagcagctgctctcgcttgctgctacaatcccagtcccatggcgactgaagcgaatgcgacgagcacgccgaccaccgattcgccgccgagcaggcccgatgcggctaccaatccggtttcttcctgctccttctttctatcggaggcttcatcggctgggagttttgcgcggcggcgtttgcagacggcatcgtatccgactttcgccatggcgcccagaaacgcggtgagggacatgtagaagggcaggtagatacccaggcccagcatcatgaccggcaggccgagcaggtagagcgcgcatccggcgataaggccgatggcgaacgcgggtaccgagggtatgcccgataccatcgtggcgaccaccgacgcctgggcggcaacgaacgtgccttgcgtgccgaacgcatcggcgccgtatgcgctcactaaaacgaacagcacggcaacggcgacaagcgcgccgagcacgccgccgatggcctggccgatccactgggccttcggatcggtgccgagcacgtgtcccgctttgaagtcgttcatgacatcgcccgcaaggccgcaggcgactgcgatgactcccgcaacgaagaaaagctgcacctgcgcgacgttcgacgcggcggcaacgatgagcagtacgatgaggccgaatatctccatggggtcgatgcccgtttggcccacgctttgggctcccatggcggtggtgacccaagcaagcagtacgacgatggcgctcgcgagcgggtcgagtcggagcccgaagcatagaagcaacgcaactgcggcaacggcgagtgcgatggctcccgccgtccagcgcatgcgccgcttgcggctctcgggctggacggcagctgcgggcgtcgtcagcttgagaggcgccggcgaggccgatgccgccttgatcaagccgatcgccttcggaaggatgttcttgagaatgacgccgatgccgcatcccatcatggcgcccatgccgaggctggcggtgatgccctgaccggtcgctgtatcccacaggccgagtccgctgccgccgacgatgattccaaagtttccgattatcgccccgacgaaccacacgacgaccgaggcggttccaacgagaaagcccacggcaagcagcatgggggagttgtagatgccgaacgccacgcccggtatcgaaaccgatccgaacagcatggcgggtatcgtgccgaaccagtcgcgcagcgccgtgtagatgcccgcaagcgccatcgacccgaacagtttcttgccggtttttccgccgctgtttcccgctatgagcgtttgggctgccgcctgtccgatggggtactcgagatcggcatcctcgatgaagtgcttgcgcagaaccgcagtgcatataagcccgaggattacgcccgaaagcgccacaatgagcatttcccaccagttgacgtcgttcgccttggtgatgatccagatgccgggaatggtgaatgcgagtcctcccgcaaccatggctcccgccgacatgatcgtatgcgtgacattggcttcgtgcagattcgtgttcccgagtgctttgaggaaaaacagggagatgattgcggcgaagatgataggccaggggagcgcgcccatcttgagggcggtataggccgatgccgcggtgatgatcgcgcagccgacgcatcctatggcgatgccgcgcgcggtcaactgacctttcgcagggttcatgatgcaaagctccttctcgtatatccgcttccttcggaagtcgggttactgaacggactcgtacagtataatcgccatacgcgatgattgcacttcattttgtacgatacggcggaaagacgggtggttgcgcaatggcggcgaatgcaaacagggatgctgcgtttgttctggcggtcgacgtcggaaacaccgtgacgagattcggcttgatcgcccgcggcgtgcttgctgcttcatgggagtttgcaacgcgcgagcgcatgacttcggatgaagctcgactggaaatcgcgaatttcctcaatatgctcgagcgcgaaaggacgcgcgcgcaggcaaagggcgatgacgctcgcctgctcgatagcgttttttccgatgacggcaggttcgtcggaaacccgaccgacgccattctctcgtcggttgtccctgacttaaccgatatatgggtaggcgcgcttgctgtcgaatgcggaagaaagccgttcgtcgtcgggccgggtttgaagaccggcttgaagatgcactacaacgacccatccgaagtcggttccgatcgggttgcaacgctggtggcggctcgcgaggcttacgggtatccgctgatcgtcgttgatttggggacgacgacgaacttcgatgtgcttgacggtgagggggccttcgcgggcggggtcatcgcgcccggcatcgccctttcggccaaggcgctcgcgcaggcagcggcgcggctgcccgttatcgagataaaggttccgtcgtcgacgatcgggaaaagcacgcgcgaggccatgcaagccggagtggtgcttggcgaggttgcccgcatcgacgggctcgtcgatgcgatatgggcagaactcgggtgttcgacgaaagttgtagcgaccggcgtgcaggcgggcatcgtagcagctctgtctcagcgagtcgagtgtgcggacgaaccgctggtgttgcgggggctcggcatgctgtatgcgctgaacagcaagcgctgaatccgctttgccgccgagcgcctggcggcaagataagccgcgccgtcagcgaacaaggtgctcgggtgtcgcttgcaaggcgtgcccggcacccgagcactctcggccccttttacgatcaggcttgcgagatgtgctcgcaaaaatccccgtagagcgaatacgacgctcccgcgatgatttcggtaccgtcccaggggtcgagcgccacgaagttatcaaggctgagcgcatcgaggttcgtcgcccctcggtagccgatgagggcgatccaatgttcgttcgacgttcccgtcacgtggatgacggtcggttttcctgcagcgatctggtcgtaggcttcgcgcagcagcgcttcgttcgacccgagggatcgaaacgacgaattcccgccgccccatcccggccaggtgcacatgccgcagccgtaggcggcatgatcgatggcaatgccctggacgacggcatcgccgtaggcgcaggcgtagccgggacagcagatggtgtggccgcttgaagcctgattgccgacagcggctatcagggcgggatcgtaggcgagcagtttgtcggtcttctcgagttctgcgacccgccgcgcctcatcctcttcggcggcgagccgctgttcgtagcgttccttgagagcatcgagcggcgaggtctgctcgatatcgaacgacgaaaagggaagtgcggccgaaagggactgtgcagcttcataggcttcgaccgggtcgggttcgggaatgacgatttcagactcaaccgagcttttcgattctgccgatatggcgaaagacgcaggtgggagagcatccgagcgatccggttcggcggcgagcgcgagcgttggggggaaggagcaagcagcaaccgcggcaagtgcaatggcggttctgcggaaacgacgttccagcaagtgatttcctgcctttctggaccggtggtgggttggtggtgtggttcggtctcgagagcgggcagtatgctatcggattggaggatgcctgaacacacgttgctccgatcctgcagggaagcgccataagtgctgcaagaaacctacataacggttcggcaacaatttttcggcctgcaaccgccgaaggcggtcttgcggggtttgcgcgggatacgccttgtcgcctgcgccgcggaagcgcggacgggcgtcggtgtttccggcaggggccttcgagcatgcgataagggagttatttgcctcgtagcgccatccgcttgcggtgctgctcgtcggtttgcccgcacgttttctttttttctgcagcggcggctttctctttgtggcacaatttgaaagattgggttcgggaagaccggaccgaacggccgccgcaggcggcacctcgtgagaaaaggggatgaaacgtgagcatagataagccaacgcccactatgggggcaaaagacagcccggatgcggtatacgatgcgcgtacgctcggtgcgccgaaaatggcactgttcggtttgcagcacatgtttgccatgttcggcgcgacgatcctcgtgccaacgctgacggggctctccgtttcggcgacgcttctgttcgccggcgtgggaacgcttttgttccacctgctggccaagggcaaggttcccgcgttcttgggctcttcgttcgccttcattgcaggctatgccgcaatagcgccgaacggcgaagccgatctcttgccctatgcctgccttggcgttgcctgcgcgggccttttgtaccttgtgctttcggccctgttccggatattcggccccgctcgcgtcatgcggttcttcccgcctgtcgtgaccggaccgatcgtcattgcaatcggccttatccttgcgagttcggccatcggcaacgcatcgaccaattggccgatcgccatcgtggcaatcgccatcatcgtggtgtgcaacatctggggtcgcgggatgatcaagatcattcctatcctgctcggcgtgatcggcgcgtacgtggtcgctgcagttgcgggtgtcgttgacttcacgccggttgccgaagctgcgtggatcggcgctccgttccaatggagcgatacggtgttctccatcttcggtgccgatttcaacgcgggacttgccataacggccatcatcaccatcatgccgctcgcgtttgccactatgatcgagcacatcggcgatgtctcggccatcagctcgacggtcaaccgcaactatatcgcagagcccggcttgcaccgcacgctgctcggcgacggtcttgcaaccattctggcatcgcttttcggcgctcccgcaaacactacgtacggcgagaacaccggcgtgcttgcgctgacgcgcgtgttcgatccgcgcgtcattcgcattgccgccatcttcgcgatcgtcttctcgttctgcccgaagttcgcggcggtaatttcggttatgcccgcctgcgtgatcggcggcgtgtcgctggttctgtacggcatgatctcggctgtgggcatccgcaacctcgtcgagaaccacgtcgatttcatgaagagccgcaacgtcatcatcacggctctgattctcgtgctctcgctcggcatcgcctacagcacggcgggggccctcgtcgtgccggtgggggatatcaccatctcgctttcaggtctggccgtcggatcgatcgtgggcattctgctcaacatggtattgcctgggcacgaggatatcccaggcgaagagcctcaagctctttcggaatacgacgagctggatcacttgccgctcgaggggtcctacgagggcttggcgaacgctaagaggtaggatcgcgcatttcgctgcgaggcttcgcttgacgcctcgcagcgcaccgcctcaagttgatgagtgctgcgattccgctgtgcgccggtgcgcgagcgtgcgatcggctggaagcttgcggggaaggctattcgaggcacgctgtgatgcgtgcgttttagacaataaccgtgcaggcgactcctgcccaagcccgacacatcagcgtcgctcctgcgggcgaagccgaacccgtgaaagtgcgggcggttgccgaggctgaaaagaaagcgcaggcaaaacctctgcgtcggcattttccaggtgattcgaaattaaaattacccatggtttacatttctcgcattattcggtactatgtttccataagttaactaaagtaaacaataagtgccgatcacggccgcttgcgaggaggcgttacgcatatgagcgaattcggactggccggggacgcgggcggtaagggcgtggcgattgaaatggctgctcgtgaagcagcgcaggcgccgagtattcggaaggcgaaagagcgcaagggcgccgtcaaggctctctgggctgcgggcgggttcgtgagcttcgggctgggcgtcatcggggccgtgctgccgatcattccgacaactcccttcttgcttgcggctgcgtttttctttgcacggagttcggataggctcgacgcttggttcaagtcgaccaagctctacaagcgagtgctcgagggctatgcgacgaagcgttccatgaccgtcaaggcaaagcttgccatcctcgttcccgtgacggttttgctttcggtcggctttgctctgatggcgaacgtgcctatcggacgcatcgttttggcgatcgtctggatcgggcatatcgcgtacttcggtttcgttgtgaaaacggataggtcgaagtagggttttccgtgtgcagcgcacatgttctcggcagtctctcggtgaaaagttggtctaatctaaccgtgttgtgttaggcttgggtaactactgaatttcgattgcagagacgaggcctcatgttcgataagcggcttttggccatggtgccgacggccatgcgctacattctagccaacgtgctgttccaatggatttcactcatcgccaatattgcgatgatggttgccatcgggttgtttttgtacgattccctgatgggtgcggcttcgggggtttcgttcacgcaggtgcttcttgttgccgcggcggctattgccgttcgggcgttgtgcacggtgctggcgcaatcgatgagcttcaaggcggccgctcttgcgaagaagacgatgcggcaggcagtctacgacaagctcacgcgcctcgggccggcctatgcggaaaagatccctacaagcgaagccgtgcagatgagtgtcgagggagtcgagcagctcgaggtgtatttcgggtcgtatctgccgcagttgttctatgccgttgtcgctcctgtgaccttgttctgctttcttgcgccctggagcttgcccgcggctctcgtgctgttcgtctgcgtgcctcttatcccggtatccatcatggccatccagcgcattgcgaagcgtgtcgtgcgagcctattggggcaaatactccgatctgggcgggacgtttttagagaatctgcagggtcttacgacgctcaagatctaccgggccgatgcggcgcgccataagctcatgaatgaggaggccgagggtttcaggcgggccactatgaagctgctgtcgatgcagctcaactccatcaacgttatggacctgctcgcctacggcggtgctgcgatcggcatcattgtcgtcttgttccagttcgggggcggtgtcgcctccctgacggctgcattcgtcatcgtgtttctttccgcggagttcttcattcccatgcgcacgctcggatcgtttttccataccgcgatgaacggcatcgcggctgccgagaagatgttcgacctgcttgacgctcccgaacccgagcgcggaaccgaacgcatcgatccggcgaactgttcgatcgcatgcaaggatctctcgtattcctatgacggggttcgcaccgtgctctccgacgccgatttcattgcggagcaaaaccggttcaccgctatcgtaggagagagcggttcgggcaagtcgacgctcgcgggaatcctatcgggacgcaatgcggcgtacggcggtacggtttcgatcgggggaatcgatgcgaggagcgtttcgcgcgagtcacttatgcgctcgctggtgactgtatcgttttcgagctacctgttcaagggcagcgttcgatcgaatctgctcatgggcgatccccaggcgagcgacggcgaactgtgggaagcgctcgaccgatgccgcctgggcgatttcgtgcgtgccgagggcggattggacatgccgcttgccgagcaggccgccaatctttcaggtgggcagcgtcagcgccttgcgctggcccgcgcgttgcttcacgatgcggatatatacatattcgacgaggcgacttccagcatcgacgccgaaagcgaagcggcccttatcgaggcgatcgacgaactcgcgcaatcgaagaccgtcatcatgatctcgcatcgcctggcggcaatcgcaaacgccgattgcatttacgcgatggaagacggccgcatcgtcgagtcgggcacccacggcgagctcctggcgaacgattcggtctatgcccgcctgtggaatcagcaggcgaagctcgaagcgtacgccgcccgcgagcgggcggcttgcacaggcgggcaaacggcgtctgccgatggcgcttctctcgcgggcgatgcggggtcgtgcgcggccgacaaggaccgccctccgattgaagatgtgggggagacgtcgggcgcgccgagggaaaagcgcacgaatctatccgttatgcttcggctgatcacgctcgtcggtccgcttttgccgtacatggtccttgccgtcgtgctgggcgttgccgggttcttcgcagccatattcctcacgacgttcggcgcatatggaatcgtcgacgcggcgggcatgcccgccggcatcgggttcggagcggcgtgcgtgctcgttgcggtatgcggcatagtgcgcgggcctttgcgctacggtgaacagctgtgcaaccatttcatcgccttcaagctgctcgcgctcatccgcgacaaggtgttcggctcgctgcgcagacttgcgcccgccaagctcgaggggcgcgacaaaggcaacctcatatcgcttctgacatcggatgtcgaactgctcgaagtattctatgcccacacgatttccccgatagccatagccgtcgtggtatctctcggcatggcggcgttcatcggatcgttttcccttccgctcgccttcgtggcccttgcggcgtatctcgtcatcggacttatcgtgccccttaccgcctcgcgcatggctggcaagggtggccgcgaattccgcgatcaggttggcgatatgaatactttcgtgctcgacagcctgagggggttgcgcgagacgttgcagtacgggtgcgagaggaagcgctcggtcgagcttgagcggcgcaccgaaaacctcgcttcggtcgaggccgtgctcaagcgcagaatgggctggttcatggcccttaccagtgcgctcgtgctcgcgttcgacgttgcgatggtcggggttgccttcagcttgtatgccgcaggcgggctcggcttttcggaagcgctcatctgcgtgatggccttcatgtcgtcgttcgggccggtgatcgccgtcgcaaacctcggatcgacgctgcagcaaacgttcgcttcgggtgcccgtgtgctcgacgtgctcgacgagagccccgaggtccgggatgtgaccgacggcgttgccgtatcgtttgcgggcgccgaagcccgagacgtcggcttttcctacggagccgagcagatcttggggaacgtgaacctgcgcattcagccgaaaacggtggtcaacatagccgggcgcagcggatcgggcaaatcgacgtttctcaagctgctcatgcggttctgggatgtgacggaaggatcgatcgagctatccggaaccgatatccgtgcgatcgatacgacgagcttgcgcgacaacgaaagctatatgacgcaggaaactcacctgtttgcgggcaccgtgagggaaaacatcgcgcttgtcaagccggaagcgaccgatgcggaactcgacgaggcgtgccgcaaggcggcgatcctcgatttgatcgggcggctgccgcagggttacgacacgccggtcggggagctgggcgatacgctctcgggcggcgaacgccaacgaatcggccttgcgagggtgtttctctacgatgccccgttcgtgctgctcgacgagccgacgtccaacctcgatagcctgaacgaggcggcggttctttcggcgctcgaggcgagcaaggccgacaagacgatcgtgcttgtgagccatcgggcatcgacatgcatgttcgccgacaagacgtactcggtcgaaaacggccgcgtaagctaggggcgcatggcgtggatgccgatggaagggtcaaagtgcttgtgagcgcatgcctcgcgggcgagcggtgccgtttcgacggcgcggcctgcacctgcgcaggaatcgacgggatcgccgagtttgccgagcttgtgcccatctgccccgaggtgctcggtggtcttcccgtcccccgaaagccctccgagattttgggttctcgcgtggtgacgtgcgacggggccgatgtgaccgaggcgtttcagcgaggcgccgagcgggcggttcgcagggcgttgggagagggatgccgttttgcggtgctcaaggagcgaagcccctcctgcggatcgaaggcggtttacgacggaacgttttcctccgtgctcgtgcagggaagcggctttgccgcggtggcgcttgagcgggcggggatcagggtgtacggcgaatcggatttggcgaaactgaaaaaggacatcgctgccgaataaggcttgcgatgtccttttcgcctgcagggcgctcggttcctccgtttgagcgcgtaaagcgaaggccggtcggcccacagcgcccttcggagcggaccttcgattacttcgcggtcttgaaggccttccagatgagcgcggcgagcgcggcgccgacgagcggggctgcgatgaacacccaaacctgggagatcgcagtcggatcgatacccgccatcatgagtgccgggccgaagctgcgggcggggttgacggatgtgcccgtcaacgggatacccatgatatgcacgaaggtaagcgtgaacccgatgattatgcccgcgtagggagcggtcttctcgttggcggtggagccgagtacggaaagcacgaaaatgcaggtgaggataccctcgacaacaagtgcgccgacaaggccgatgccgaccgaggaggcggcgtcgtagccgtcgcaaccgagtccggtcgcagcgactccgcccaatgccgtgcagttggcgatgatgaagtaaagcagggcggcgccgacgatgccgccaacgaactgggcgatccagtacccgacaaggtctttgcccgagagccgtttgtcgaggaacagccccagcgatacggcggggttgatatggcatcccgatacgttgccgatgacgaatgccatggctatgatcgaaaggccgaatgcgaacgcgatgccgagggttccgagtaccgaacctgccacggcagcgctgccgcatccgaacagggtgagcacgcaggtgcccaatgcttcggctgcgtacttcttggatgaagcgacttccatagatcctcctttgacgagcggttttgtgcaacagcacatgctaccatcgcaaggagatgcgaacttctgattcatctaacggttgggtcagggccagcgtggcgaagaagcgtccgccgcgctgtctgcggctgctgtgcggaaagctcagcgcagagatggaagctcggcttcggcaagcaggtcgcccgaaagctctttgagcgagaagactccgtcttcgaacatggcgtagctgcgcgatccgtctttgggaatcgagacgctgcccggattgacgagcaggatccctcccgtttcttcgagctgctttttatgggtatgcccgtacagaaatgcgccgcccggcgcgatgtagggaaggctctcggggttccagaggtggccgtgggtggcgaacagcgtcctgccctgcgcgtcgacgagctcggtgtaatcggccatgcagggaaagtcgagcaccatctggtcgacttcggcttcgcagtttccgcggactgcgatgatgtgctgcttgaagccgttaagcgtgtcggcgaccgccatgggatcgtactgttcgggcagcgcgttgcgcgggccgtggtagagcagatcgccgagcaaaagcactgtgtcggggtcctcttcggcgatgcgttcggcgagcatggagcaaaagcgagcggaaccgtgcacgtcggaggcaatgagtatcttcatggtgatcctttcgcgttgtgcgccgacgccgaagctagcttcgcagatcggcgcagtagtcctgcgagatgatgtgcttgtcgcttttcgggaagaggaacccgtagagcgtcgtgaagtagctgtcggtcatcgaagccatgtagtcgacgacgatttggtcggggtcctctgtgaggtactcgtctgcgcgcacggtgcgcgatttcgttacgaggttcgagatgtgatggcgaaacaccggcgagtcctcgttgcgcgctgcgagatcggaaagcagtttttcgtacatttccgcgaacatctcttcgacgatgttgccgtaacccgatatgacgccttcgttgaagtatatctgctcgtagttctgcgctttggcccgcttgaggtcgtcgaagacctccttgctcatcgcgatgcggtctttgccgtagctgttgttgacgatgtcgatggtcaggttgttgatgatctgggcgtttccccgtccgatcaccctggagtcgaagcttgacagcgagtcgaccacgcccatgtccatggcgtcttggcgatcctttcccaggtaggcgatcatgtcgctcacgcgcaccacgcacccctccagcgtcgaggggcgcaggcgcttgatcgtcgtctcgtcgagatagcagtcctcgactatccggtcgaaggcctcgaagctgccgagatcgctcacggagagcacctgttgggcgaattcgccattgtgacagagcaccccgtcgagcgtctgcaggctgatattgcgtctgaaaagcttgtcgagcacgcgtaccgagtgcacgttgtggttgaaaaagcgtccggtattggcgtggtagagcttgccgaggaacttctcgcctgcgtggccgaacggggtatgccccacgtcgtggccgagggcgatcgcctcgatgagatcgatgttgagtccgaggatgttgccgatgttgcgggcgatgcggcttacgagctggacgtgaaggccgcgcctcgagatgtcgtcgttttgtatgaaggaaaatacctgcgtcttgtccgcgtaacggttgtaggcgggaacgttgatgatcttctcgatgtcgcgtccgaatgcggggcgggtaagcgttgcctcgtcatgctcgctgggctggcgccttatgacgttttggtcgtcgaatcgataggggttcgcaacgtggttcaggcgatcttctcggatcgcgtcggctattgcggggtcgagggaaaggtaggggatggggctgcgggcttgctgcccgggatcggtcgatgggttcgcagtgtccatgcggtgctcctctgcgtttgtcgggggcgcgccctgggcgcgccgtgctgttcagcgctattgtatcttattggacaagccgttggtgccgtgctcggatttcttcaggttatgcacctttggaggttttcggcaaccgagttcgagcggcgctgcggatcggcggaggcccgtgacggagattcgccgagggcggtgaagccgacgcgtcgccgccctcgctcttggggtatacttgtcgttgatcatacaagcgtacgcatccgtgataaggaacgcataggcagtggcaggcttcagcgaagaggatatccgcaaggtgcgcgaggcaaacgacctcgtgtcggttgtcggcgaccgcgtgcccgtgaagcagcggggtcgcgatttctggtgctgctgccccatccacgatgagaagaccccttcctgcaagatcgatccagcatcgcagctgtggcattgcttcggatgcggtgcaggtggcgatgtgttcagcttcgtcatgcaagtggatgatctcgattttcccgatgcggttcgcaagctcgccgagcgcgggggagttcagatcaccgaaaacggcaaaccggccgttgcccacggatacaaggcgcggctcaaggaaatttgcaaggaaacggcggcgttctaccatatgcaactcatgcggggcaaggatcccggcgccgcatcggcgcgcagctacctggcgagccgtgggttcggcggggaagtgcccaagcgctgggagctcggtttcgcaccgggatcggggcagctcgtgcgccatctcaaggcgaagggcttcaaggacaaagagctcgtcgatgccaacgtcgccctcgatgggggcagggatggccgccgcggggggctgaaggatcggttctacaaccgcgtgatgtttcccatcttcgacgtgcagggcgattgcatcgcgtttggcgggcgcatcatcggagacgggcaacctaaatatctgaactcccaggaaacgcccgtattccataagtccgaggtgctgttcggcctcgacaaggcgaaaacctccatggccgcaacgggcgttgccgtggtggtcgagggatacaccgatgtgatcgcgctgcatgaggcgggcattcaaaacgcggtggcaacgctggggacggcgctcacgacccagcatatccgtgcgctctcgagacatgcgaagcgccagataatctatttgttcgacggcgatgaagcggggcagcgcgccgctgaccgcgccctcgggttcatcgatcggtccatgacgcccgaggcgggccgcaccaagatcgagctcgccgccgtaacgcttcccgatgatctcgacccggccgatttcgtgggccagcgcggcgcggatgcgctgcgcgaactgctggcctccgctcgccccctgctcaggtacggtatcgagcggcgcatagcgaaatacgacctctcttcggcggaagcgcgggcggcggctctcgccgatgctcttgcggtgcttgcgcctattaaggattcgatcctcgcgaaggattacgcgatccagatcgcgggcatggtccgcgcccgcgaaaacgacgtgctcgaacagctcgagcgcctcgagccgccccggcagcccggcgcgcaggccgagcctgcatccgagcagccgacgcgccgtccgacggcagcgtctgcgctcccgcaaagcgaactttcccgccgccgctacgagcgcgagttcttaagcctcgtggcacggcggcccgaggagggtttgcgtctggctgaagccctcgcccagacgcaatggcacgaaacggtgcacggcctgctttcccaaagcatccttgcgacgcttgcggataatccccaggcgaaggctcccgatatcattacggcggcccagcaggcggtccccgctgcggcgagcatcctcacatcgggaacgatgtcggaggagacgggggcttcgcggcttgcgacgtttcttgccgaggaacttgccatcggcgatatggacgatgcgattgccgcgctcaaggcccagcttgcgcaggccgataggctcgatcctcaagaatacgagctgttgttcgaaagcgcggtggccatgcagaaggagctggcgaagcgcaggcttgcgcacaaatcggtcggacaaggttgattcgccgtacgcgggggcgggtgaagccggtttgcacgcggggtcgggcgaaggtgactggccgaggtcggaagaacggtcgaacggggcgtttcgcggggttctcgaccgtgttggcggatagtgtgaccgagaaggtaacagaatggtttcgggtgttctaacataacagagaacaagttacatttagtatacttgtcatgaaagaaaggaggcgttatgagtcccttcatatggctcggagttgcggcggtcatgggcgtcgtcgaggttttatcgctcggcttgatcaccatgtggttcgtcatcggagcgcttgtcgcatttcttgcgaacctgctcgggttcgacctcgtggcgcagctcgtcgtgttcttcctggtatcgatcgtctgcctgatcgttctcaggccggtgttcgtcaaataccgcaaacgcggagaaaccgaagaacccgacgttgtcgggcaatccgccatcgttatcgagggcatcgacaacgaacgcctcgttggccgggttgaaacggccaaccgcatgacgtgggcggcgagaagcgccgacaactcggtaataccgaccggtgagacggtcgttgtgaaaaacagagagagcatcacgctcatcgttgaaaggaaacaagcatgaatgcattgatcgtagtcgcggtgctcgtggtattgctcatcctcttttccgtaacctgcataaagatcgtaccgcaggccactgctgcggtcgtcgagcgtttcggctcgtatttggccacctggaacaacggcctgcacgtcaaagtacccttcatcgaccgcgtgcgcggcggcatctcgctcaaagagcaggtgttcgatttcccgccgcagcccgtcatcacgaaagacaatgtgaccatgtccatcgacacggtcgtgtttttccagatcatggatccgaagctgtattgctacggcgtcgagaaccccatcattgcgatcgagaacctttcggcgacgacgctgcgcaacatcatcggagacttggaccttgatacgacgctcgtctcgcgtgacgtggtgaacgcgaagatgcgggccatcctcgacgaggcgaccgacgcctggggcatcaaggtcaaccgcgtggaggttaagaacatcacgccgcccgccgccatccagcaggccatggagaagcagatgaaagccgagcgcgagaagcgcgaggcggttcttttggccgagggcgagaagcaggcggccatcacgatcgcagaaggcaacaagcaagcccagatcctcgcagccgaggccgacaagcagcaggtcatccttgccgcagaggccgagaaggaaaagcagatccgcgaggccgagggcgaggcggacgccatccgcaacgtccagcaggcaacggccgacggcatccgcatggtgcgcgatgccggtgccgacaacgcggttctgacgctgaaggcgctcgaatcgctcggcgtgctcgccaacggaacggccaccaagctcatcgtgccgtccgatatccagggcatcgcgggccttgccgcatcgctcaaggaggttttcgttgatgaaccttctgtcaagcggggcgaatccgctggacaagatcggtaacctgaccgacaatggctgtgaacaacaggggatttccgcaaaagcccgctttcacggaaatcctttcctcatagctttgaaaaggaaacgaacatgaatatcgtgctttcacccgatcccatgctgcggcaggtatgcgagccgtgccgcgttgaagacaagagcataaagaaactcgccaaacagatggccaaggcgatgtacaaaaacaacggctgcggtctcgccgcaccccaggtcggcgttctcaagcgtgtggtcgtggtcgactgtgacaccgaatcggacgagcgcaatcccatctacatgatcaaccccgaactcgtcgagcttcagggcgatcccatcgtcatgggggagggttgcctgtcgtgcccgggcatcacggtcgagatcgcccgcccgccgttcgccaaagttcgctttctcgatctcgacggggaggaatggactatcgaaggcgacggactgctgggaagatgcctgcagcacgaactcgaccacctcgacggcaagacgatgttcgaggtgtgcgatcccatggcgaggatcgaggcgctcagggcctacgaggcggcgctggcagccggggcgaaaccgggagaaacgggtcccgtgcaatgaaactgatcttcatgggcacgcccgagtttgcagctacgatcctcgaggatcttgtgcagcagcacgaaatagccgctgtttacacgaggcccgatgccgttcggggccgcggggccgaaaccgcggcgtcgcccgtgaagctggtggccgaacgctacgggatcgaggttcgcacgccgcggacgctgcgcgacgagtccgaacaggctcatcttgccgcgctcgagcccgatgccgtttgcgtcgcggcctacggcatgatacttccgccggaggttctcgccattccccgatacggctgcatcaacgtgcatgcgtcgctgctgcccgcatggaggggggcggctccggtcgaacgcgccatccttgccggcgataccgaaaccggcgtgtgcgtgatgcgcatggaggagggtctcgatacgggcgcttactgcatctgccgcaccgccagcatggaagacaagagcgctgcggcgctttccgacgagcttgcgaacttgggatcgcatgcgcttctgacggcgctcgtccatattcaagaaggcgttgccgaatggatcgagcaggacgaggagcgcgcgacgtatgcgaagaaaatcgagaagcatgagctcgaccttcgtcctgaagacgatccgcgcaaagccgtgctgaaagtgcgcgcttcgagtccggcccatccttcccatgccgttttggcgggtcgatcggtgacggtgctcgagcttcggggcatctcaggcgacgaggcggcgctggaactgactcgggatatggaacgcggttcagtgcggtttgcgggcaagcgcttgttcatcggtctgaccgggggtgccgctgaggtgctgcgcgtgaagccggatgggaagcaggagatggacgcgaaatcgtttgcggccggcatccaaggcatcaaggacggctctcttgtttggggggcgcccgatggcgtataaaggatcgcgtgaccgcgccgcgaaagcgagtccggcccgtcgtgcggcgcttgaggtgggcgcgatcgtgcgcacgcgcagcgcctatgcgcaggatgtcatagcgaagcacgtagacgggtcatccctttcgcccgaagatcgggcgttttcgaccaagctcgcattgggcgtggcaagcagttcgggcacgctcgacgaggtgatcgatcgatgcctcaaatcaccgagcgacataaaaagcgacgtgcgagacgcgctgcgaatcagcacatacgagatcatgttcctcgataagagcccgcatgctgcggtcgatcagggagtcgagctcgtcaggtcggtagccccgaaagcggcgggacttgccaatgcggtgctgcgaaaaatcgtggcggccaagcaggattttcccttcggcgaccctgcaaccgatgtggcggcgctcgctcggtcctatgcgtttcccgaatggctcgcccgcaggcttgtggccgatctcggcctggagtcggcggtcgccttcatggaggaatcgaacgagcctgcgccggttttcattgccgtcaacgggttgaagtcttcggacgaagaggttctcgccgcattcgaaagcgcgtccgccccgcttcgcgcagtgacgttcggagcggatgccgttgcgggttgctatcggctcgaggtgccgcgcgcgcttcaagatgaggcggtcaagcgcctgttcggcgagggtaagatccttgtgagcgatgcggcctcccaaatggttgccgccggcgtgctcccgaaggcgcgaaagccttcgacgtttctcgaagtgggtgccggtcgcgcgacgaaaaccatcttgctgcagagcaatgcgaagcgcttttacggaagccagctcgatctttacaccctcgacaaccatgagttcaaaaccaacctgctcgtcgaacgtgctcagcgctacggggccgccgttgccagggcatgcacaggcgatgcgaccgacctcgatgcggtttttccggaccgctcgttcgacgaggtgttcatcgatgcgccgtgctcggggctgggaacgctcaggcggcatcccgaaatcagatggcgcattaccgaaaaggatatcgatgcgcttgccgaaacggggttcgccatgctcgtttcctctgcggggcacgtggcgcagggcggctcgctcgcctatgccacgtgcacggtgctcaggcaggagaacgcggaaacggtcaagcgcttcctcgaaagcgaggcgggcgcagccttcgagctcgacgagatatgcggcaatcgcgtgttctcgacgaggctcggatcgcggtcttctgatgcgcatttcgcggtacgtatggtgcgtaccaggtgagtggtgtagaatctcccaccgtcagctcacaataacgaacatctacgaaagggctagtatgcaacctgcacgaatcatggaaatcctcaacgtagccgagattgcagcgatcgcatgtgccgactggtcggggaaaggcgataaagtcgccgcggatcaggcagcgacgaccgccatgcgcaatgcgttcaacgatatcgagttttccggacgcatcgtgatcggggagggcgagcgcgacgaagcccctatgctctacatcggcgaggagcttggccgcggcggtgaagagatcgatatcgccgtcgatcctctcgaaggaacgaacctgtgcgcatacaacaaacccaacgcccttacgacgatagccatcgctccgaaaggcgcgcttctgttcgcgcccgacacctacatgcagaagatcgccgcaggtccggcatgcgtgggcaaggttcatatcgataacacgcccgaagagaacgttcgcgccgttgccgaagcgctcggcaaagacgtgtccgatgtgaacgtgtgcattctcgaccgcgatcgccacaaggatctcatccaaggcgtccgcgatgccggcgcacgcgtccgcctcatcgatgacggcgatgtgttcggcgcgatcgccacagccgttccgggtacgggcatcgatctgtacatgggatcgggcggggctccggagggcgtgctcgcctgcacgggcctcaaggccatcggcggcacgttcatgggacgcttccgattccgctccgacgacgagcgcgcgcgtgccgagaaaaccgccgaggtcgatcttgacggcgtgctgaccatggatatgctcgtgcgatccgacgatgcggcgtttctcgcatgcggcgtgaccgatggcgagatggtttcgggcgtgtcgaaagccgacggctgcgttaccactgaatcggttgtgatgaatgcggcagacaaaacggttcgtttcatcaaaacgtgccgtcgaggcgaaaacggcgtcgtccggttccattaaaatacgactgaataagttatggtttagctcaaacgcagcaaccgtgcatggtatgataccctacgggttaacccgtagggtattgttttgcctagattggaagctgagtttgcgagagcgaaatacgctattcgaatacatgtaccgtgatcttgccgataagatcacatgcggattgcttcgctacggagacgtccttccctcgatgaacgatttgtgcacgcgctacaacgtgggcatcagaaccgtgcgcgatgttgtcgccgctctgaaagaggacggcttcattgtcaccgaagagcggaagcgcgccacggtttcgtatcgggcgaacctcgaagatggcatcgccgtgggcgcacgttctctcattgcccgtagaagcacggtgctcgagagccttcagacgctcgaactgcttatgcccatgatgctctggagggccgctcggtcatgctccgttgaagagctcgatgccttgcggagcagtgcgtatccggtggattacgagattcgctcgggcgattggcgcgtgtcccggtcttcggtggctcagcacgagcttttgaaaaaggccgataacccgttgttcgtggagtgcttcgcaagccttgagcttgcaagcatcgttccggtgtatccgggatacgctgatccgtatgctgatgcttattgcgccgtttttgctacaccgttccacgctccactgctacagcgttccatggcagactgccacgtagcaatgcgggttgctctgattgcgaggggcgcgcaagcgcccctcttggccaatacggccggttatgctcttagccgatgcgcttgcgcattgactcgtcgccttcaatatggatgacgtccgaccgatagactatgcggtcgatgacggcatctgcgattgctccttccccgagctttgaatgccagcctgctggcgagaactgcgagcaaatcaataaggacccgctgcgcaagcgcgcctcgactatctctaaaagctcgcgcgccgccttcccctcgagcttttccaaaagccaatcgtccagtatcagcaagtcgcatttcgtgtagcgcttcttcgccttgagccaatcctcgttcttgctcacgttcagctcgtcgagcatttcgggcaaccggacgtaccttacgctgaagaaggcgttgcaggccgccaccccgagcgcgcaggcaatccagctcttgccggcgcccgacgcgcccgtgatcacgacgttgcggtggcctcttatccatgtgcagttggacagctctatcagtttcgtgcggtcgagcttgcgatccgcgtcgtagcggacatcggcaatgttcgcctcgggatcggagaagccggcctggcgcaacagcctcgtcctcctgttgatgcggcgcgcgtcccattcggcatcgactatcatggcgaacctctcgtcgaaggtcatctctgccactccttgcgattcctcctggtcgcgatacgcttgcgccatcaccgacatcctcatgccatagagtttgtccatcgtcgtctggctcgccgtcattattcatcgtccccctcgctcaagttccggtagtagtcgcctccgcgcagatacgctccggcgttttggtcctcgggccctgcggcccccatctccgagataatcgatttgatcgtcttgtagctcggcctgggcgttagagagcaggccttggcgcacgcctgctcgagcatctcccttccgtgcttcttcgcgagcgccagcaccgcgcggcacgagcggtaggactgctgctcgatcttgcgcgacctcaagatggcatcgacggcttccccgcaggacgggccgatcccggccgcccatttacggaagcgcttcgcgtcccactccacaaagtcgcgatgggaatcgggcatgtggtcggggttggtgcggtagcttcccctagggccgtagatgcgctcgtgcatggcgattcgctcgccgtcgcaggccacccaaacagcggatctggtggcgcatagctccacctcgcgcttgacgtagctgaacggaaccgagtaccagcatccgtcaaacgagacgtggtagttaaaattaacagtgacaaccttgcgggtaaccatctcgtagggcttgcccggcagcgggatgagcagcggcttctcttggcggacgaagacctcatccctgctgccctcgcgcttctggaacggacgggcgttgatctcgcgcaccttctccaaaagagcctcgttcagctgccggagagaggtgaacagctggttgcgaaggggcgcgatggcgcgctgctcgatgaccctcacgctcatctccaccgcccccttgtccctcggcctcctggggcgcgcgggcacgacggcgcacccgtagtactcggccatcctgcggtactgctcgttgatcacgagctcttcgacggtgttcttgacgacgccctgcttgaggttgtcgggaaccactatcggcacgctgccgccgaagaaggcgaaggcgtggacgtgggcctcgacccaggactccgctctcatgttgtaggcgccctcggcgaacatctcgcccgaatagggcaagcacgccacgaagacgtagactttgcgcgcctcgccggtgtcggcgtcgagcacctccatggtgtcgccgacgtagtcgacctgcatctcctgggcgggtttgcgctcgatgcgcatggagaccttgttggcggccgcccaggcgcggtgcttctggcagaaggcggagtacaggtagggttccatgcccgatgccagggcgtcctcgcagtactccctccaaagcgtcagcatggtcatgccgggacggttcatctccttgtcgatgcggggatggtcgatctccgccttcgacatatcggatcgctcctttgccggatagatgacggctcgaatcgccgcatcgttcatctcctccggcaagggccactcgaggccgtgcgccttcgcgcgggtggtcaccgcccttaccgttgcggtggagcacctgcacgagaacgctgtgttcctgacactcacccccatcgccctttgccgaagtatttctctgtacttgaccattttttcttcctttctcgcaatggtccgatgggcacttttgtgcccatcggaattgtggcggaaaaggaagcgcccctttcggggcgcgtggcaatttagattgttagggtgtggcagtctgccatggagcgctgtagcagtggagcgtggaacggtgtagcaaaagcgctgcaatagtcatgctgaggccgtcgagcgttccgggcatgttctcaaggatgtgttcgatgcgttgaggctcggttcttacgagcaggcatgcggcgagatatcctatatgtttgcggatatggccgaatacatcgttccttatctggatgccctggaagccgactatccgatcgacgataaggtatcgggtcttccgtatacctggaatgcgcgcgccgggcgggaatacgcctacgcgcagcatgcccgcgacgttatcagccgcatcgcttcaggggaatatgccgatggggatctgctgccctcgatagccgaattcgccgagatgtacgatgcctcgctttcaaccatacaaaagacgctcgagatgatcaatgcgctcggcatcgtcgagacggtcaacgggtgcggcacgcgggtgtgcttgtcgaatatgcgcttcgacccccgctttttcggcgagccttcatacaagcgcgataccgaggtttttcttgcagcgctcgatatgatgggcattgtgctgccggtggccgtaaaaacgacggccggccgattcgaggatgtcgtttaaggagttgcatgcgctcggcttgccgaaacaggggagtgggcagggcagggggcgctcatgaagggcgtcatcggagcggtgcggttgcagccgctccgtgcaatcatggaagagctcaacgagcttcttttctggggcaacttctttgtattcttcgggcccacgagagagaacaaggatacgcttctgggcttgagcagcgatgcgtacgcggcgctggagaagcgcgatgtccaagcgttttccgacgccatggccgattactaccagtacatgctcgtggcgatcaaggcgtttctttctcaggttgagcgtcagtagcggaaaagcgccgccaccccggtgtcagacggcatgcgatccgcgtcgagcacatagacatcgccgccttgcagataagctgcctgggcgaagtcgtcggtgaggtcgtcggaggcgtcgagcgcgtctgcgccatatgagagcgatcccgtttcgggatcgaacgttccgggaacgagctcgccgcgttctatgaacagcgtttccaccttgcgctcggcaagggcgtgggcgacttcgcgggggtcggtcgaagcgcggccttgcgatatctcgctgcccagtcgatctgtccgttctgcgatgcgcgctttctggatgccttcgatgatggaggtcgcctcctcgagcacctctttttcgtccatggaataaaagggcttctcgatgctttcgtcgagcaaggtcggaatcgacgaaacctcgcgaaatgcattttggtgttcgggaaggcttaccaggatgaacggacagcggtgcttgctcgcgaaatgctcctctatgatcttggacgcatagcggaagtgctttatcgtttccttctcgatgacctcgctcttgtcgccatagcggtgatagctcggagcgtggcttccgtgggtcccaccgaggccgagcagcgtgttgtcgaaatcatcgaacacttcgctgaagcgcgtttcgacgccttcgggcatttcgagcttttcgatggtatggaaatcgccttcgtacagcgcgaaatcatctgccgacaatgcgatcaggtagtagtgcgacccgaattgaaagtttctgatgagaggtttgatgtggtagctgtcggtgactgagacgaactcatcgacggggtagtcgagcttgtagatcgaagccttttcgttgcttgcgagaatcgcgagtccgtcttttgcgttgcgccagattccggaatcgcggtgctcttcgatcgagcgcagtgctgccatgatcccctcatactgcttgcgatcgtagttgagttcgaggagatcctcgacttcggtcatgaggttcttgtatctgatcggatcctgttggttttcgggtgcatgacgatgggttggcatatacagcgatacgagcggcgcctctttgcaggagaacagggttgggtcgaattcggttaagacggatatatcggttttcatgggttgtctcccctcgaatacttgtcggcgggtccgatgcccgcactcgatagtgaatatgctacctacgatactcgttgggcgggcagggggccaaaacggtgacggcactgtttttcgacggttgcgttgtcgttgaaatattcgcattgaggacagcctgtgtcctcaatggtaaggtattctgagggtgaccgaggacggcaaacaagcgaggaagcgagcagctcaatggaaatcatttccgtaacggcagaaaacatcgaagacgagcacatctgctgcgcgataaccgaaaagaagggcgaaacgtgcgttgcggccaaaaaagcctggatggccgataggttttccgacgggcttgcgtttaggaagctcgatgtgcgcggcaaggtgttcatcgagtacatccccgccgaaaaggcgtggtgtccgatcgaagcggatggctacatgcatatcgattgcttctgggtatcggggcagtacaaaggcaagggttatgcaaacgaattgctcgcagcttgcatcgccgacgcgaaaaagcagggaaagctcggcgttacggtgctgtcgtcggcgaagaagatgccgtttctttccgatccgaagtttttgaagcacaaaagtttcaaggtcgccgatacggccgatccccagttcgagctgctgtacatgccctttgatgggagcgctcccgcccctgctttcaaaagccaggtcaagcaccctcgcatcccagatgccggactagcgctcttctataccgatcaatgcccctttgcgggaaagtacgcgcatatcgcagcgcggatggctgaggagcacggcgtgccgtttgctttgcataagatcgattcgcttgagaaggcgaaggccgctcctgccgcatgcactgcatacgcgctgtttcgcgacggggaatttgaaaccaacgagatcctgagcgagaagaagctctcagagctgttcggcagatgagaaagagcattcagtacttgctcacgccgcagcgaagtttgatttctcgaatatcgtcgggcatgtcagctggatccatttcgtgggggacgtcagccgttcccgcctcgaccgcggtatcgtaaaaccagcacttgtaagtgaggaaatcgagcgtctgccgcagtgactccatctgctcttccaatatcttcttgcgcgcatagaacagctcgcgccgctcctcaagcgtggaatctccttttagatacaaatccacatattgtttgatctccttgatcgaaaggcctgatttcttcaatctctcgacaacctggatccattcgaagtcgtcttcggtgaacatgcgaatgccgctttcactgcgattcatgtgtggcagaaggccttccttatcgtaatagcgtatcgtcgatgcgctcagccccatcttcttggcggcatcgccaatggtgtacagcatgaggtgctcctttctggccacaagatctccacttgacttaaagttaactttaacagctaggatatagctcgaagtaactgaaggatagtatagatcatagcgtagcaggatgaaaatcgagtgtctagctttagctggaaagcggaaagaacaaggagcatgcgatgaaacgagtgagcgaagcgaagtatgaattgtgcgagatgaatcaggaccaggcggcgctgatcggaagaagggaattcgtcggcatggcggcggctgtgggggctggactgtttctcggcgggctcatgtccggatgtgcttcggagctgggacagggcgtttccggggatggagagcgcagcgagcagtctgcgggagagggatctgccgcgagtggcgctgcacctgaggaagaagttcggatggcagcaggaaaatcgctcgttgcggtattttcgtggtcgggcaacacgcttcaaatcgccgggcgtatcaacgagcttgtcgatagcgatctttttcgcattgagccgtctgagctctatactgaaaactatgacgacctgcttgaaattggacgcgccgagcaaaacgagggaattctgccggagcttgcggcaacggttgaaaactgggatgaatacgaaacggtgtacctcgggttcccaacctggtggtctcatcttcctcaggcggtggcttcgttcttgcaccttcatgatctggcgggtaagacggtcttaccgtttaacacgtcggggagcagcgggtttgccagcactctttccgacatccagtcgatctgtcctgacgtgcgtctttccgatgggatcagcatcacagcggatgcggtcgccgattcgctcgatcaggttgacgcatggctgggcgaatcgggcctttggtgatgcgaaggcggttatggagtgtgccgtggaggatgtctatgaagccaagggattcgaaagcttcatccgctcgatccgcaacacctatgccgacgattcggttttgagcgattcgggcgagatcgactatgctgcgtagacgcagcatagtaaaagggcagggttcttgaagccctgcccttccattgacggtctattcggaagtcgtatgtcagtcggcatccttgtcgcggatgaccgcacggcggatctttccgttcacggttttcggaagcgcatcgacgtagtcgatgatgcgggggtatttgtacggagcggtttgatgcttgacccaggtttgcagttctttggtaagctcggcggtgccggcgaagccgggagcaagcacgacggttgccttgacggcgaatccgcgcagctcgtcaggtactccggtgacggcgcactcggcaaccgcctcgtgctcgagcatgacgctttcgatttcgaaaggcccgatgcggtagccagacgatttgattacgtcgtcgttgcggccaacgtaccagaaatagccatcctcatcgcaccacgcggtgtctcccgtatggtaccagccgtcgtgcatggcggctgcggtcttctcgtcatcgagatagtactcgagcatgagtccgggcatcttcggctcgcacttgatgcagatctcgccggtttcgccggtattgcagcgggttccgtcatcgcgcaggatatggatggtgtagagcggaacgggcttgcccatcgaacccggtcgcggaaccgaattagtgagattcgcaatcgtgagcggtgtttcggtttgcccgaagccctcgtagatcgtgagccccgtgtgctctttccagaactcgaagatgtcggggttgagtgcttcgcctgcggtggtcgaataaacgagcgtcgagaggtcgtaggcgtccacgttatcctgcatgaacatgcgatacatcgtcggtgggcagcagagcgtcgtaatgccgtatttcccgatgagggagaggatgtctcctgcatggaagcggtcgtagtcgtaggtgaacacgcaggcttccatgagccactggccgtagtatttgccccagacggctttgccccagcctgtatcggcgatggtgaagtggatgccgtcgggcagcacgttgtgccaatgcttggctgtgatgaggtgggcgagagcgtaggccgaatcatgcagcaccatcttggggtttcccgaggtgccgcttgagaagtacatgagcatggggtcggccgaagccgtttcgcaccgctcgaattcttcggatgccgcgcggacgcacgtgttgaaatcgagccagccttcgcgcacggcgggtttggcgcagatgccttccggacccgagagctcggatccgatcggatgatcctgctcggagaacagcagcttgtggttctcgtcttcgggggtcagaccgccgcctgcaccgttgacgaggatcttcgtttcaagcgtggcgcatgcgtcttgcacgttgtcgcatacctcggcaatatcgccgagggtcgttgcgatgatggccttgatgcctgcgccgttgaggcggtattcgaggtcatgttccttgagcatgaaggtggcgggcaccatgacggcgccgagcttgtgaagcgcggtggccacgaaccagaactggtagtggcggcgcaggatcaccattaccatgtcgccgcggccgatgccctgatccttcaggaagttcgcggttttatccgaccagcgcttcatgtcggcgaaggtgaaaacatgctcttcgccttcagggttgcaccataccatggcccggcggtcgggatcgttgtcggctatgtcgtcgacaacgtcgtagccgaagttgaaatcatcggggcaggtgacggaaaacgattcaagctggtcaagatcgttatacgattcggtgacgtaacggaggttcaaatttctcatgacaatctttctttcgagcggacggctggacggccgttggcgggcgatcgggttgggacgttgcggcactgtcggcgatgcggcagtgcctaagaaatcttgtcttctccgggcttcataacgatcgcgaggaacacgcatggctcgccgcctgttgcgatcatgccgtggccgcgtcctgaatcgtacatgagcatatcgccggcttcgagctcttcgacgtggtcttcgtaggcgaagcgcatcttgcccgacaggatgtagtcgatttcctggccggtatggcgagagaggtgaatcggctggttctgctcttcttcgaggtaaggggcggtgacgaggaacggctccgcgatcttgtttttgaagtggggcgccttgtgcagatactcgaaaccggcacggcgtttgatcgagagcccatcgttggcacgcgtgagcgaatagccgcttaaatgcgggttctcgccggtgagaagctcgatcacgtcgacaccgaacttctcggcgcatttatagaggaaggtaaacgaaaggtcctgctcgccgttttcctgcgcggagtactctgccacgctgcggcccgttgcgtcggccatctcctgcatggtgaggtccatgtcctctcgcagcgcgcgaattcgacctgccacctctttgatattcggctccatgaacattgacctccttttcattgtctaggattatcggcgtacgcgctgcggacggtcttcgatcaagcgttcgacgcgcggtttttgcaattgtatagcaacctatttccgattcagctgggatatcgaagaattcccaaggtgttccagatatctttgcctgcggcccttgacttggagtggactccaagtgctatataggtgatagggatatccgttatcccgaaaacagccagatgctacgaggcggtaccgcgcatgcgagagcggtaccctgagatacaagagcgatattgcgtaatacaaggagcgcgccatgctgattgcagaagtaagcaagaaatatgacatttcagccgatacgcttcgctactacgagcgcgttgggctcattcccgccgtcaatcgccgcgataacggcatccgcgattacaccgaggaagacctcaactgggttgaattcatcaaatgcatgcgggctgccggaatccaggtcgaagcgcttatcgaatacgttgcgctctaccagcagggcgatgacaccaatgcggcgcgcaaggacattctgatcgagcagcgcgagcagctcgtcgagcgtatggaggacatgcgggtgacgcttgaaaggctcaactataaaatcgacaattacgatcgcgttatgcgcaaaggcattgacatgtccgactgcaagaacgctgataaaggttaggctgaagcgtagagacgcttctcggattaaaagttgtctgacgatcgcattgatcgagcgcgtgtcggggccatgtagattcgactgtggcggccgatggttttgcttgccggccttctcctgcatggacgatcctcgtcgttgatcgatttgtgcccgattaaggcgttacctaaaccacagccgagggaaagcggaagcgcatcttcctcagacagtcgcttggattcgcgtgcggctgtccgaatgggcatgcgatcatccggattcgcatgcggtcgcctgaatgggtgggaggccgcttgaatatgcaagaggtgcctaggtgccatctcgagcgtagagcaaatccaccgtcgcttccacggcggcaatctggccgtgcagtcctttgcagcgataatcctaccgcgtaggcagggattgctgcgattccgagcctctgccccggcaaatgtggttcaattaaatgcggctcaattaccaacgagagtgcgggctttttgatcgggcggtttacgggtcactgaagtttttgttcgcaaaccgccttcgaatatttgcagagcgcaaagaaaggatttccgatggccgaagatatggcaaacggtttggccgaaggtggcggtgccgcagcgcgcgcaagcgagcaggctctctttccgctttcacctattacggtggtcatagggcattacggcgttgggaagactaattttgccatcaacctggcactcgatgccgcgaagcgcggtcaagaggttacgcttgtcgacctcgatgtcgtgaatccgtattttcgcagcagcgattaccgcgacacaatggaaagcgcgggcgtttccgttgtgagtccggtgttcgcgggcacgacgctcgattccccgagtttgtcgggcgccgtctacacggcgatcgaggacgccatgcggcaggaggacggcgagcgcaagtgcgtcgtgatcgatgcgggcggtgacgacgtgggagcaacggcgctcggcagattcgcgccgcggatagccgcgcagcgccacgaggttctctacgtggtcaacagatatcgcaaccttacacaagaagcggacgaagccatcgggcttttggccgaaatagaagcgaaggcctgcttgcgggcaacgggcatcgtcggaaattcgcacctcaagcaggacacgaccgatcagaccatctgcgattctgcgcctttcgtgagcgaggtgtccgaagcgtcgggcttgccgatcgtgtgcactgcggtgccaaaagagatcgttggccagaaaaacgactcgttttgggaaagctgcgctatccaaaacgtgtatcctgtgcaagtgtatgttcgtactccgtggggcacctgataacacccggtacatatctgcaccgagcagccgcgatgcgcggccttggttgttcgtagagtgcgcaatcagacgaggaaggttgaccatgccgagaattatcgtagacgatcatttctgcaaggggtgcggtttatgcgtcgatgcatgcccggtggacataatcgagctggatttcaagaagattacgtccaaagggtaccaccccgcttatctggtcgatgaagacaaatgcacaggatgcatgtcgtgcaccacgatgtgccccgatgttgcgattacggttgtgaggtagccatggctgagaaagtattgatgaagggcaacgaggttctggccgaagccgctctgcgcgctgggtgccggttcttcttcgggtatccgatcactccgcaaaccgaattggcggcgtacatgtcgaagcgtatgccgaaggttgggggcacctaccttcaggccgagagcgagatcgccgccatcaacatggtgtacggcgcgtcggcggcgggtgcccgcgttatgacgtcctcttcttcgccgggaatctcgcttaagggcgagggcatctcgtacatggccggcgcagatctgccgggcgtcatcgtgaacgtgcagcgcggcggcccgggactcggcggtattcagccttcgcagtccgattactggcaggcgacccgcgcaaccgggcacggtgatttccagctcatggtgttcgccccctcaacggtgcaggagatggccgattgcgcgttcctcgcgtttgagaaggccgacgaataccgtatgccggtcatgatcttggccgacggtatgctcggtcagatgatggagccggtggtccttcccgagccgaaggccgatcttcccgacaagccgtgggcgacgaccggtcacaaaggcgagcgtgagcacaacatcgtgaattctctgtatctgcaggctgccgatcttgagcgcctcaacaacgagcgcttcgagcgctatgcgaaaataaaggaaaccgagcagcgcgccgagctttttatgaccgacgatgccgagatcgttgtcgtcgcgttcggcgcatcggcccgcatcgcgcgcagcgccgtcgtcacggctcgggaaaaggggatcaaagccggcctcattcgcccgatcaccctgtggccgtttccctccgatgcgatcgaatcggtcattccccatgcgaaggtccttttgagcgtcgagatgaatatgggacagatggtggacgacgtgcggctcgtttcggcaggtcgcgtgccggtggaattcttcgggcatgcgggcggcatcatcccgacgcctgccgaggtgctcgagcggatcgaaacgttgaatggaaaggcgggtgcgtaagatggcgaccgaaggcaaggtaatcttcgagcgtccccaggcgctccttcccgtgatcacgaactactgtcccggatgcccgcatggcatcgtccatcgccttgtcgccgaatcgattgacgagctgggcgtggagggcaagacggtcggcgtcgctcccgtgggatgctcggttactgcaaccgatttcttcggatgcgatatgatcgaggctgcgcatggacgcgcccctgcggttgcaaccgctgtgaagcgcgttcatcccgacaacgtcgtgttcgcctaccagggtgacggcgatcttgcgagcatcggcatggcagagaccattcacgccgcaactcgtggcgagaacatcaccgtcatctttatcaacaacgccatttacggcatgaccggggggcagatggcgcctacgagccttccgcaccaggtgacgcagacttcgccctacgggcgcgatgtttcgacggcgggctatccgattcgcgtgtccgagctgctctcgtcgctcgacggcgtggcttacatcgagcgcgtgacggtcgattcgccgaagaacgttcgcaaggcgaaaaaggctatcaagaaggcgttccagaaccagatcgacggggtggggtattctcttatcgaggttgtctcgacctgcccgaccaactggggtctgacgccgcaagatgcgttttcatggatgcgcgagaacatgcttccatattatccgctcggcgtgtaccgcgacgtcatcgccgacggctacgaaagcgttgccgctgcggcggcggagcgggcgaaggactgtccgctagccgttggggaaaaggagtagagatggcgcaaacctataacatcgtgcttgccggcttcggcggccagggcattctgttcgcgggaaagatcatcgcgacggcgggcctcatcgacgaccgcgaggtgtcgtggcttccttcctacgggccggagatgcgcggcggcacggcgaattgcagcgtgtgcctttcagacgatccgattggatctccgctggtggtgacacccgatacgctgatcgttatgaaccagccttcgctcgagaagttcatcgataccgtgcccgagggaggcgtcgtggttgcagattcgacgcttgtgcaggatatccccgaacgggagggcgtgaccgtctgcgcgatccccgcaaccgagatcgccgagcaggcgggtctgaagggcttggccaacgtcgtttgcgtgggcaagctgttcaaggagacgggtttttgcagcaaggagacgctcgatgcggccgttgcgaaatgcgtgcccgcttcgaagccgggaatgctcgagaagaacaagcgcgcgatcgcgcttgggatggaagcttaggaggctgtatggtcacggagttcgccgagataggcctgcgcatcaaagggttgcgcgaagcctgcgacgttacccgcgaggagatggcgcgagagctcggcgtgccgctcgaaacctatatcgattgggaggagaccggcgccgatgtgccgatctctgccatctaccatcttgcgcacaagttcggcgttgaattcaccgagatcttgacgggtaccgcggcgaagctcaacagctaccacgtggtgagaagcggcgagggccgcgaggtggatcgctatcccggataccatttcgaggatttggcttggcgctacagcggcaagatcatgcagccgctgctcgtcgtgctcgacccgagcgacgagcccgccaagctcgtaacccactcgggtcaggaattcaacctcgtgttggagggttgcgttgttgtcacctggggcgataaggaattcgagctctgtcctggcgacagcatctacttcaaccccgaatacctgcacggccagcgctgcggcggggacgtgcccgcaaaattcgttacgatcatcgcagaataggaccggctcgtgaaccacatcttaagcaagtactgcccccgcatcgatttcgattcgtacgaggacttcttggagaatttcaagatcgatgttcccgccgatttcaacttcgcttacgacgtcgtcgacgaatgggcgcgcgtcgagcccgagaagcgggcgcttctctggtgcgacgatgcgggagaggagcgcgaattcactttcaccgacatctcgaagctgtcgaacagggccgcgaacgcgttttcgaagctcggcatcgggaagggcgacgtcgtaatggtcatcttgcgtcgccgttgggaatactgggtgactgcgatggcgctgtgcaagatcggagcgaccatcatccccgcctctttgcagctcaccaagaaagacatcgagtaccgcgccgaaagcgcgaacgtcaagatgatggtatgcgtgaacgacgaatacgtgtgcgcgcaggtggaggaagcgctgccgaaatcgccgagcatcaaagagcgcatcatcgtagcgggcgatcgggggggatggcgcggtttcgacgagctgatcgccggcgaatctgacgagtgggtgcggccgacgggcgaggatgccacgacggcgaaagacatcatgctcatctacttcacgagcggcacgaccggtcttgcgaaggctgtatcgcataacttcgcgcatccgctcggtcatatcatcaccgcaaagtactggcagcaggttcaggaagacaagcttcacatgagcgtgaccgacagcggctgggcgaagttcggatggggcaagatctacgggcagtggattgcgggcgcgtccatcttcgcttacgacatgggcaagttcgtgccgactcacctgcttcagaagatccaggattacaagctcaccacgttctgcgcgccgccgacgatgtaccggttcatgctgcaggaagatgtcgccgcatacgacctttcgtcggtcgagaacttcgcgacggcgggcgagccgctgaacgccgaggtcacacttgcgtgggagcgcttgacgggaaagaagatccgcgaggggttcggacaatcggagggccctgtccttctggcgacgttcccctgggtcgaaccgcgtcccggctcgatgggcaagccttctccgcttttgaacatccggttgctcgacgatgagggagccgaggtcgaagacggcgaagagggcgccatctgcgtgacgaagctcaaagaagcctaccccccgggattgttcgtcgggtactacaaagacgaggagcgcacgcgcgaggcggtcggcggcgagtactacaatctgcacgacatggcatggcgcgatagcgacggatattattactttgtcgggcgtgacgacgacgtgatcaaatgcagcggttatcgaatcgggcctttcgaggtggaaagcgcgcttgtggagcacgatgcggttatcgagtgcgcggttaccgcagctcccgatccgatccgcggcaaggtcgtcaaggccacggttgtgcttgcgaaagggtgggagccatccgacgagcttatcaaggagctccaagatcatgtgaagcatacgacggcgccgtataagtacccgcgcatcgtcgagttcgtggacgagctgcctaaaaccatcggcggaaagatcaagcgcaagctgatccgccaaaacgacgggatccacgactgagctcatgtacgagcaggcggaaatctgataaaccggtcgggcatggcgctcggccggttttgctttgcaggatttgcgcggtgcgccgatgccgctgcctcgcgggtgcagggcgccctcccgttgcatccctctgtagatcgcgctacaaacgcatgacgttttctcccaaaaaggctttccgtgcgtatgatgatctggaatttactaccgaagggagataacaatgaacggccctcacgatacatttgttttgcgcaacggatacgaaattccctgcatcgggttcggcacctggaagatgcccgacgggcaggaagcgatcgatgcgatcaacgtggcgctcgatgccgggtaccggcacttcgatacggcggcggcgtatgaaaacgaggagagcgtcggaaaggctttgaggcgatcggggatcgatcgcagcgagctgttcgttacgagcaagctctgggcgagcgatcgcggctacgacagcgcgctcaaggcgttcgattcgtcgcttaagaagctcggcctcgagtacctcgatctctacctcgtccattggccggcagccaaaggtgccgacgaggtttggcagaaggaaaacgccgatacatggcgtgcgctcgaaaagctgtacaacgacggctacatccgcgccatcggcgtgagcaacttcaagccgcatcatcttgaaccgctcatgaaggtgagcgagatcgatccgatggtcaaccaggtggagatgcatccgggcttcccgcaaaccgagacgaagaagttctgcgatttgagcggaattctcgtcgaggcatggtcgccgctgggacaaggtcgcgttctcgatgacgatcggttgctcgaaatcgccgtgaactacggcgtgacggttgcgcagctgtgcatcagatggtgtttgcagaacaatgcggtgcctttgccgaagtcgatgacgcctgagcgcattcgcgagaacgccgatgtgttcgggttcgatatcagcgccgacgatatgcgcaagatcaacgaactcgagcagttcggcatgtcgggactcgaccccgatgaggttgatttctaacatcaaggccgcttaaacccaacgtgcgaaaaccaagcgagcgccccgacaatcggggcgcttttgcgtagaggcggctgtcaaccgcatcttgtcgaatgcgatgcagcaatcatcgttttcggcgtacagggtggaaaggtatcgcgattttcctcatgctgttcgggttcgaggtcgttatcgcggcgatgatccgtctgatgccgtaggccggcgctttgcggcgcatggtgtgaaacgctgttgcagacgtatgcagtaagatcggtattcctttcgtaaacctgatgaatcttcttaaggtttatgcaggcagtcaagatgttttcggcattttaccagcggatatacagttcgaaaatcgcaccgtgctaccatgcggcgatcggttcgaatactttttacgcgagaagcccccgaatcggtttctcgatttagcgaacgccccgaacccgggatggccttcatcgaaacgggcggcggcggtctgatccgaggcgatatcgaagacgaacgctgtccgttggctcaacgcgcgcccgaacgaggcggcttgccgtgctgcgcttcaaagcggcgcgagcgcggggcgaaggaggatgctcgatggattggaaaagcgaaatgaaggaatgctcgagaacgcttgaagacttgggcgatctcttgcggtttggcgaagcggatagggcgaggatatcagcaattctcgaccgcgcacctatggcggtgcctccgtactatctgtcgctcatcgatttcaacgatccggaggatcccatcctcaagttagccgtaccgtcgctgctcgaggaggatcagtctggaagccttgacacctcgggagaagccgacaacacggttatcgcgggcattcagcataaataccgcgaaaccgtgctgatgctcgcgaccaacgaatgcgccatgtactgcaggcattgcttcagaaaacgcatcgttggacttcccgacgagggtatcgcgaaagacttcgataagatcgcggcctatcttcatgcgcacactgagatcacgaacgtcttggtgagcggcggcgatgcgatgatgtgctccaacgagcgccttgaggagatactcgggttgcttgccggcatcccccatatcgacttcgtacgcattgcgacgcgcgcgcccgtgacgctgccgtcgcgcatcacctccgacatcgggcttctggatgtgctgaaacggtatcgggaaagaaagcagctctttgttgtgacccagttcgatcatccgcgcgaggtgacctcggaggcggcgaaggccgtgagggcaattcttgatctgggtatccccgtgcgcaaccagacggttcttctgcgaggagtcaacgatgatgtcgaggtgcttgcaagcctgctgcaaaaactcacttcgattggcgtcgagccgtattacgttttccaatgccgtccagtttcgggtgtgaagaaccagttccaggtgcctttgaaggaaggtgttcgcatagtcgaaggagcgaaggccctgcaaaacgggatcggcaagtcctttcggtattgcatgtcgcatgtgacgggtaagatcgagattctgggtacgttgtccgaaggcccgatggcgttcaagtatcgtgaggcgaaggaccgtgagtcgatcgggcgcctgttcgttcgcgaggtggcagacgatcaggcctggctcgactaagctgcccgagacgccctggcagccgcccggcggcccgcatccgctgggcgtcttgtgtgctcgggcatcgaaacgaaacgttaacggctccatgagcaatgcatgacagtgctcgctgctggttttcccgaagagtacagtggtaggcggcgcatcgccgaaaccgcgaacgggtgcgcttctgaggaggcttacgtcatgcagggcagatccgccggtgccgaaacggaagggcggtcgaacaaaccgaagctgagacgtgtcatgtcggttcccgacatggtggtctacgggcttatattcatggtgcccattgcgccgttcggcatctacggcggcatattcacggaatcgggcggcatgccgacgctcgtgtacatcgtcggcacgtgcgctatggcgttcacggctctctcctatgcatcgcttggccgggagtttcctgtatcgggatcggtgtatgcctatgcgagcagggcgatcaatccgggcgtcgggtttttgaccggttgggcgctcatgctcgactacattttaagcccggtgctcctgtacgtcgtatcatcgaccgcgcttcatggaatcgtgcccgaaatacccgcgtgggcgttcggcgtcgtgttcgtgctggccaatacgttcgtgaacgttcgcggcatcgagacggcctctgccgtcaatcgcatcgccctcgtgcttgagatgctctgccttgccgtgttcatcgtattggggatccattgggtcgcgacggacccgtcatcgaaagggttcacattcgatcccgtcttcaacccggaaaccttcgatcccaaccttgtgatgagtgccgtgtcattgggcgtgctgtcgtttctcggcttcgacggcatcgcgacgcttgcggaggaggcgaaggacgctcgccgcggaccgggaagggcgatgatggcctctcttgcaatcgtgggcacgctattcgcggtgcagacctacattgccggatgcatcagccctgacggtgcggtattcgcgcatgaccaggacaacgcgttctaccttgtggcgggtttggcggggggaagggcgctctctgttacctgtgctcttgcaacggcgttgtcgtggggaatcttcacggcgcttgccgcccagactgccatctcgcgcatactgtttgccatggggcgcgatgggagccttccgcatgcgcttgcgaggatccatccgaaatacaagacgccctatgtggcgacgctgttcgtgggcgcggtgtcgctcgtgctcgttttggttctgggcagattcggcaccgatacgatatcgctgttcgtgaacttcggcgcactcacggcctttctcgttctgcatgcgaccgtcgtgtggcacttcttcgtcaagaagcgcgacggcaaagtattcgcccacctgatatcgcctgcgataggttttgcggttatcgcctatacgtgggtgagtctgagcatgccggcgaagctcctcggcgtctcatgggtgcttgcgggcgttgcatactacttcgttttgcgcaaggttctgaagaagaaagtgcgcttcacggactcgtgaggcatctgttcgaatttctgagccgatttatcggttttacggtatcatgatcgagcgccgcttcgggcgcgttcgctgaaacggagatggatgggtcctggtgggccccacggccttcaaagccgatgtgaggcgcgcagaacgtctcgggtgcgttcgattcgcatgcatctccgccatttgcatccgcatgctatcgcagataacgcagatcgccgtcgcgcctcgtcatgccctgggaatcgaaatgctcgagcaggggaatggcgtatttcctgctggtgttcatggcctccttgagctcggctgcggttgcgggtccctgctcgagtcgggcgcgcgcactgccggcgagcgattcgaatgcggcggcatcgaagaagaactcctggcttacgcggcggacggcgccttctttttcgagtatgttgagcgcgcggtgggcaagtgcgggttcgactccgcttgcggcgatgagatcggatacggttgggggcgtgccgcctgcggcggcgagggttgcggctagggtctcggttgccagctcgactgcttttcgtgccgctgctcctgctttcgggtgggcaacctccccgttcgaggcgatcgccgctcctgcggaaacggcatcggcgagcagggcgtcgaaggattcggcgtcggctgcgggaacggcacgctggcgaaggatgtcttttgcgatgcccggcgcagtcggattctcggcatggaatttgagcaaagcgttttcaatggcggaacggagccgctgaaggttcgatttcgccatgtagaacgagcctcgaggggctccttcgagccgtacggccgcaccagcggcgacgagggcgtcgagctctcgctgggcggctggggccgaaaggccggatgctgcggcaagcgccgatgcggtgacgggcaggctttgagtcgcgaaggacgcttttgcaacggccgattcgttttgcgtgcagagcgcttcgagcaactttagatcttccggcgagatgttcgtcgttctgcgcggatgggcgcgaagcacggtgccgcccccgattacgtgaacgggggagtaggatctcaccacgaagcggtcgcgccaggatacgggcaggggttcttcgagtcgaatctgtgcaaaggcccgctcgccgcacgcaagcgattccctctgtccgatgaggagaacgcgcccgaaggtctcgcgcgttccgtgcgccacgcggacgcgcgtgccgctttcgagggagcgtgttttgcccggaacgcccaggaaggcaagttcggcatcgaatcgatcggttggaatgatcgcaccgggtgcggcgatgaacgagcccggtcggatttcgcttgtcgagagggcgttgaggttgagggcaacgcgatggcctgcgagtgctgttttcgatgccgtcccatgaatctggatgccgcgaacacgggcgcgcaatccgctcggcagcacttcgatttcgtcatcgagcgcgatttttccgctccagagggtgccggtgatgacggtgcccgctccttttacggaaaatacccggtcaacgggaaggcgggggatcgaaccggtctgaatgcgttcggtcgcccgcgccatttcagcaagggcccctttgaggtcgtcgaggccttgtccggttttgctcgaaacggaaacgacgggggcgtgggcgtagggggtttgctcgaggcgcgcctcgatttcgtctgccatgaaggacgtccactcgtcgtcgaccagatcgattttggtcagggccacgacaaggcggggtacgcccagaagctcgagcacggcgaggtgttcgagcgtttggggcatgatgccgtcatcggcggcgatgcaaagcagcgcgaaatcgatgccgctggatccggcgatcatctgtctgacgaagcgttcgtggccgggtacgtcgacgatgccgagcgacacgtcgccgggtaggtcgagccgggcgaaaccgagttcgatcgttataccgcgtcgtttctcttcgctcaggcggtcggggtcggttccggtgagggcgtagacgagcgatgatttcccgtggtcgatgtgcccggccgttccgagtacgagatcgcggctcatcgggtagcctcgcttttcgcgggattcgggcgaatgcccgatcgtgaggctgggtcgttgcgaagggcgcgcgtggtttctgtcgatacgtcgagcgcatcgaagtaggcgcgcagcgcggatgcggcttcggggatgtcggcatcggtgatcgtgcgggcgtccaaaagaaccgcttctttcttgattcgtccgacgatgggaacgcggcgttttgcgacgaggaacgtttcgcaatcctgtgcgtttccgcgcaagaacgtaatctgggcggcatgcgattcgatatcgcatagcggcagcgagccgccgcctgcccgcgccgtctcgttgacgacgttcacttgggcgtatccttcgggcagcgcatcatcgagcgccgatgcgagccggatcgcgcgatcgcgtacggaatcggcgggctccgagagcatgcgcagcgtcgggatggcgcgaagcgcctgctcgggatcaaggtagatgcgcagcgtcgcctcgagcgcggcgagggtcattttatcgaggcgcagcgcgcgggcaagcgggtttttcttcagtcgatcgatcaggcgacgcgagccgacgacgattccggcttggggtccgccgagcagcttgtcacccgaaaacgagacgagatcgcaacctcgcttcagcgattcggcgactgtgggttcggcataggttccgaagcaatcgagatgcagcagcgccccagatccctggtcttcgaagatcaacaggctctcagagcattcggcatcgcaagtcgagagagagcggcgcgcgttctcctcatcggcgaggcgccgcagctccgttacgcccaccgattcggaaaacccgacgatacggtaattcgaggggtgcactttgagcagcatcgccgtgtcggggccgatcgcttcagcgtagtcggacgcatgggttttgttcgtcgtgcccacctcgaccatctcggcgcgcgagagcgccatgatgtcgggtatgcggaacgacccgcctatttcgaccagctcgccgcgcgaaacgacggctttcctttctgcggcgaactccgcaagcaccatcagaaccgcggcggcgttgttgttgacggcgatggcggcttcggatcccgtgagcgcgcagatgaggcgctccacatggtcgtgacggcttccgcgcgagagcgtttcggtatcgtattcaagcgtcgagtaaccacgtgcgacatcttcaactgcgtggaccgcctcgtcggccagaacgcttctgccgaggttggtgtggaggatgatccccgttgcgttgacgacgcgtttgagcgacggcttgaggttggcgagggcgcatgcgcatgcatcgtcggctattgcgcgaacgtcgacttcgcgcagcgcatcggctaggatggcccggcgtgcgctctcgatggcttccctcacgcaatctgcaagcaaggtgcgcggcagaagcgagccgagcgctttgatctcgggcgattgcagcatttcctccacttggggaagtgcgcgaaggaggtcgggacgaggcgtctgcgccatgggaatgcctttctcgaaaccgtggatgcccaccgtgttggaccgtagcgtctttggaaagtataccagttgctccgctgcgctttcgttgatcccgccgctggcagaatctgttgaaaaatcggcgttttcggcgatcggcgtgcgttatactgcgattcagcctggctgcgggtttttgctttccgcggacggcgaccaaaagcttcaagggaagcgtcgggtgcgtctctgcagcgcatccgttcgttctgcaccgccgcccagcggcatgtttgcatgcctgcgatcgggcggtatttctcgactatacgacgaatcgacaacgcaagcagctttcgtgttgcttgcgacgaggcggaaccatgatctatttcgacaatgcggcgacgacgatggacaagcccgacgaggttatcgaggcgatgaccgccgcgctgcgcacgttcggcggtgcggggcgcggcgttcacggagcgtcgatcgcggcttcggaagcggtgtacgccgcacgcgagggcatcgctcgactcctcggtgcgcaagccgcttcgcgcattgccttcacggcaaacgcaaccgccgcgctcaacatggccatcgcggggctcttgcctgcgcggggccgggcggtgaccacggctgcctcgcacaactcggtgctccggccgctgtatcggatgcgcgacgagtgcggttgctcgcttgccgttgccccggtgcgcgccgacggatcgcttgattacccggctttcgagcgcatgctcgaagacggagccgacgttgtggtggcgacgcatgcctcgaacgtgaccggcgatgtgtacgatgtggcccgcatggcccgcacggcgcatgaggcgggcgccgcattcgtgctcgacgccgcccagacggccggcaccttgccgatcgacatgggggagatcggggcggatgtcgtgtgctttaccggccataaggccctgtacggaccccaaggtaccggcgggctggccgtgggcggcgatatcgagctgccgccgcttatggtggggggatcgggttttcgaagcttcgaagagcaccatcccgatgcgatgcccgaaagcctggaggctggtactgcgaacgcccatgggcttgcggggcttgcggccggtatagcctatcttgataggatcggcctcgaaaccgtttcgcgtcgcatcgaaggagcgacgtcccgattcctggaaggcgttcggggcttgccgaacgtcagcgtactgggaggatcgacgcgggtccgttcgggcatcgtcgccatcgtggtcgacggcatggattcggcgcttggtgccgggaggctgtggagcgaattcggaatatgcgttcgggcgggcgcccattgcgcaccgctcatgcatgaagcgctcggcacgaaagagagcggcgctgtgcgattcagcttctcgcatcgaacgagcgaagcggaaatcgacaagggaatcgccgcgctcgcgtttgtcgccgaagggggttctcgtgtatagcatcggcgtcgacatcggatcgacggccgcggaggccgtcgtggtcgaaggcggcgctttcatagaaatgccgtgaatgccgatacggcgaaacggcgcgaaaggagagttttatgaaaacgatcgatgccttcgggctggcgtgtcccaagccgcttgttctggcgaaaaaggagatcgatgcaggttgcacagaactggaggtgcgcgtcgataatgaaacggccgtcaagaatctgacgcgtctaggtgagaaaacggggctatccgttgcggtcgatgccatcgagggcgggtggctcgtcgcctacgctggcgcaggcgacaacggggtttcgcctgcgagccgaggaagtgcgccgagcatcggatctgcgggtgcggcgccggcatgcacgcctgtggcgtgctcgacgggtgcggggtgcggatactgcgtgttcgtcggaagcgacggaatcggttcgggggatgacgagcttggtcgcaacctgatgaagatggccctctacacgcttgcagaagcgggcgatcctccggtgtcgttgctgttcatgaatgcgggcgtgaagctcgtggcgggcggcgagtgccaggttgccgaaagcgttgcgagccttatcgaacagggaaccgaagtgctcgtatgcgggacctgcctcgatttctacggactgaaggatgcccttgccgtcggcgaggtgtcgaacatgtacgatatcctcgagcgcatgcgcgaggcatcgaaggtggtttcgctgtgagcgaccgcccgtacgtgatctcgttcgattcaacccatgcggccatggctgcgaacagcgcgctcgccggtgcgccgttcgccatgattcccacgccccgcgagatcagcgcggggtgcgggatgtcactgagattttctgcggaagacgatggggatgcgttggctgttgcgaaaggcattgcggacatagcgggccgagcttcgctgtacgccgaggacgacgacggctatcgtctgcttgaaaagctctgagcttgcagctgtttcgctgcaagtgcatgcagaatgggcggttgcgccgccagcggccttcggcaatgcggcgaagcgttcagtctgaaaacgcgatggtgcccgaaaggccctcggcaacggtgccgatgcgggcgggcgcacgcccgacgagggcttcgaaggagcgctcgaaatcatcggctgcttcgggcgctatcgcggcgagcagtccccccgatgtttgggggtcgcatacgatggcgaggcggttgtcgaattcttcgtcgccgagcgccccttggctcacgtagccgatcgcttcgtccatgatcgcgaatgcccggttcgggcggcagtaggcacgggcaagatcctccacgccttcgaaaagggggagcgatccgaaacgaagcgtcgcgcagcagctgcttgcgagcagcagctcgtggagatggcctgcaagtccgaatcccgtcacgtcggttgcggcgtgcgcgccgcaaccgacaagggcatcggcagctgcggcgttgagctccatcatcgattcgacggctgcgcggtaggcgctttcctgggccatatcgcacgcgtgagccgaaaccatgatgcccgtgccgagcggcttggtaaggtagagcacgtctttcggctttgcgcccgcattgcgcaatatcctatcggggcgaacggtgccgaacacggccaatccgtatttcggttcatcgtcatcgacggtgtggccgcctgccacaaccgcgcccgcttcgcgaaccgcatcggcgccgcctctcatgatctgggccgcgatcggtgcgcccagcgcgcagtcgagggcgagcaggttcaaggccacatggggtttggcgcccatggcgaagatgtccgagagggcgttcgccgctgcgatgcgaccgaattcgtacggatcgtcgacgatgggcgtgaagaagtcggccgtgaaaacggcggcgcgatcgtcgtcgagcagccagacggcggcatcgtcgttggtttcgaaacccaggagcatgcgcgtgtcgtctcccggaagaagcgtcttaagtatgtcgtcgaggtctcccggaccccacttcgccgctcaaccgcccttcgaagtcagtttggtcagcttgatcttctctatctcttccatgcgcacctcctctcagtccgtattccctccgatcgcccaacgcgtgcgcaggcgtccgttcttttcagtatagcaggcatgtgcatgcgccgcgaaattctccatcttgcgaaaaaggtcgctcacctgcagagaaagatgaccgccgccgaagatgcacgccgcctgccgatatcggggaagccccgcaacggatgccgttcgccgaacgatcgagccggcgttttcgcacggtgcaggctctgctttcgcggagaggaccgctcgcagatgaaacggggccgctcgcttggcgccgtcggcgacgcatgcgccgctcgccgaatcgcccccgtagcgggcgcttgctttgatctgtgatgaaaaagcttgtcaatggtaggatcggagcgctggcaggcagggcatctgccaaacggcccacagggtcgaaccgcatcggctgcaagcgctctcccatgccctcgagtgcgttgtcatccgatgcgcttcgcgtagaagcgtaaggcaagaacgaaggaaggagatcgaggacatgaatctctcacgcaggggctttttcaaagccaccggcgctgcgctcgcaacgagcctggcgtttgagttgtcctcccgatcggaggcgctcgccgcagagcccgcatccgattggaagctggtgaacaccgaggagtacacgaacatctgctgttactgctcgggaggttgcggcgtcatctgttcgacgcgcgacggggaactcgtcaatctcgaaggagatcccgaccaccccatcaaccaaggggggttgtgcccgaagggcgcctcgatgtcgcagcttcgcaacatcgtcgaccccgcgacgcatgaaacgatcaagaacaccaatcgcaagaccaagccgatggtccgccgccccggcaaatccgaatgggaacccatcggatgggacgaagccgcttccgagatcgcacgctgggtcaaggatacgcgcgatgccacattcgaggagaaggcgggcgatatcgtcgtaaaccgctgccccggaatcgcaagtttgggcggctctcagcagaactccgaggaagaatacctcatcaacaagatgatgcgctccctcggcgtcatagccatcgacaaccaggcgcgcgtttgacacagccccacggttgccggtctggcagcatcattcggtcgcggttcgatgacgaaccattattgcgatctcaaaaacgccgacgtgcttatgacgatcggctcgaacaacgtcgagaaccaccccgtttcatcgaaatgggtccagaaagcgctcgacaacggcgcgacgtggatcgtagtcgacccgcgctatacgcgctcggccgaaatggccgacatctactgccccatacgttcgggcaccgacatcgcgttttacggcggcatgttcaactatatcttggaaaacgacctgtggcagcatgagtacgttctcaattacacgaacgcgtcgtttctgctcgacgaggaatactcgttcgatgtgacgacgggcatcttctcgggcttcgatgaggattccgcgacgtacagcaacgctacctggcactatcaggttgaagaagagcagcagtgggatacctccgagacgggcgcttacgcctgggttgccaaggagggcgtccccgaattcacgcctcccgtgcgcgaggttccgaagcgcgatatgacgctcgaggatccgatgtgcgtgttccagcagcttaaaaagcactatgcgcgctacgacctcgaaaccgtttcgagcatttgcggcatggacaaagagctgctcgaaaaggtgtattcggtgtacgcttccaccggggagccgggcaaatcgggcacgatcatgtatgcgctcggccagacgcagcatcactacggcgcacagaactgccgtgccatggcgatcctgcagttgcttctgggcaacatcggcatgcccggcggcggcgtcaacgcactgcgcggagagccgaacgtgcagggtgccaccgatatgggaatgctggtggccaatcagcccggctacctcaactggccgaccgagtacggtaccccttccttgcgggcatggtgcgagaaggaaacgtattccgacggatactacaccaacaagccgaagttcatcgtatcggctttgaaggagtggttcggcgacgcggcgacggttgagaacgattacggttacgactggtggcccaaggtgccgaaatcgcccgactactcgatcatcggatccttcgagctcatgagccaaggcgttatcaaggggtacttcaactggggtatgaacccctgtcactcggcgcccaacgcatcgaacgtccgccgtgctatggcgaagctcgattggctcgtcgtcgtcgattgggtggaaacggagtcggcgtgcttttggaaggctcccgatatgaatcccgaggagatcgataccacggtgtacttcctgcctgccgcgctcatttacgagaagccgggcaccatcctcaattcgggtcgttggctgcagtggcgctaccaggcggtcgaaccctgggacgaggcgaagcccgactacgagatctgcgatgtgctttggacggcgatcgtcgatctgtacgaaaaggaaggcggtatcgcgcccgagcccattctcaacacgaaatgggattactacgtcgatggcaagatcgatccgaggcccgtcgcctgggcgctcaacgggtacgcctacgagcagggcggctttgaaaacggcgcgcctcagctgctgtccaccttcgcgaatctggctgcggacggctccactgcctgcggcatgtggatatacaccgggttctgggcgaacaacgatgcgccgctcgatcccgccgagcaggccatcggcggacgcagcaccgatgacccgtcgggtctcggactgtatccgaagtgggcttacgcttggcctcttaaccgccgcatcatctacaaccgcgcctctgccgatctcgaaggcaagccgtggaaccctgcgaagaaactcgtcgaatggacaggggagaagtgggatcaggtcgatgtcgccgacttcgtggcggcttcgaacggcacgcccgtgcccccgaacgacaaggcgttcttcatgctttgggaacagagcgctcgcctcgagagctacggcatgggcgatgggccgctgcccgagcactacgagcccttcgaatcgccttccgacaatcagatcaacggaaggcagaattcgccgtgcattcgcttcgccgagttcgattcggtgaagaggggcgatcgctccgagtatccgattgctgtgaccacgtattcggtcaccgagcagtggcagacaggcggccagacccgttcctgtccggccatcaacgaagccatgcccgagcagttcgtcgagatgtcgctcgagcttgccgaagagaagggcatcaagaacggcgaccgggtcagggtgttcaacaaccgcgggtctgtcgaggtcatggcactcgtgacgccgcgtttcaagccttttgcggtaaacggcgagacggttcaccaagtgggtatgacgcaccacttcgggtgggcgggcgaatacgctacgggcgacatcgtcaacgacttgccgccgaacgtgggtgacccgaactgttgggtgcccgaatacaaggcgttcctcgtcgatatcgagaaggcataggaggtgcgcgggctatgagtgagaaagcgatattgttcgatacttcccgatgctctgcatgccgcgggtgccaggtcgcgtgcaaatgctggaacgacctgccgtctcccatcgagaagaacgccaacccctcgaccggctcgtatcagagtccggccgatctgggcgccgacacgcgccttgtggtcacgttcaacgaagaggcgggcggaagcaagggggtcatgtgggcgttcggacgccgcgcgtgccagcactgcaccgacgcgccgtgcgctgccatgtgtcctgcgggggccattttcaagcacgaagagaccgggttcgttacgatggacgattcgaagtgcgtgggatgccagtactgttcgacggcatgcccgttcgacgtgccgcgctattcggctgggcttcgtacgaccatcaacaagtgcacgggctgcatcgatcgcatcgagcagggccgcgcgcccgcatgcgtgagcacctgtcagcccgaaggccttttgttcggcgatcgaagcgagatgatcgcccgcgcccacgagcgcgtcgcggcgctgaagcagcgcggctacgaaaacgcggtcgtctacggcgagagcgaaatgggcggcctccatgttatccaggtgctcaaatacggtgtggcagcgcacgggcagatcgaaaatccccaggttaatcccgctgttgcattgacgcagatcatgaagcccattacggctgtcggtgcgggcgttaccgtcgtcggtctcgcggccatgtttgcgctcggcgttggctacaagcgcgacaaagtcgtctacaacgccgaaaccgaggatacgatttcctacgaatccggcgaagtggtcaaacatggtgacggacaggacgaaaagaccatcaaggagcacatcttcgaaaaccttccgggcaagaagggaggccatgatgaataaaggacctgtccgggtttccgccgaggaggctgcgatgaaccgcatgtttctggctgccatgaaggacggcaggatcgaacgctacatcaagcgccattcgatgcaggcgcgcatcacgcatggcgttacgtccatctgctgcatcctgctgtgcataagcggcctgttcgtgttcgtccccgcgctcgccgccgccgtcgggcctgatgcggtgttcgcgatgcgcatgtcgcaccgcatcatcggcatcgtgttcgtggccgtgccgcttgcaagcgcggtgcttgctccgaggggcgtggcccacatcttcaagaacttgttcgcacgatgggattccgacgataagaagtggatggcgcttttctttccgtaccttttcttggcgaagtggattcacatgcccgaccagcatgaagtcaagagcggacagcgcttcgccgacggcatgctgtggttttgcggcgcccttatgggcataacgggcgtgttgcttcttctgggcacgacgattgtcgatttgggcgcgacggcgcacggtgcgatcctgtttttgcacgatctcgggtttctgctggtggctatctttgcgatggctcacatcttcttgggatccggcatcttccagccgtaccgtggcacctacaagctcatgttcggcaacggaatggtttccgaatccgatgcactgtaccattggggtcattgggcccgcgccgaaatcgcctcgggtgacaacgtagtcgaggtgaaacacgcgtaacgacgatgtgccgggggtctgttccacgtaaggctcccggcgcaggtttgccgttaaacgagaagaaggatgcatctattatgaacttcaagcagatagacgcagcaatcgccttttaccgcgactctgcggacgagacgacgaacgcccgcctcgcgtttttccgcgagatctgggagacgatgggcgccgtatcggaaaagcacggagaagcgcaaccgtaccgcgttcccgaggccgatgcgctgcaggcatgcgcgcgcgatcatgtgcccgttttctccgtgtcggcggttgcgattgatcgggaagcgttcgccgaagccgtacgtgctttggccgatctcgtagcgcggcaggccgcgtttcccgatacgctggctgaagaacttaccgatcaaccttgggagcagtgggttgcgcagagtccgctcgagcttgcgggaagcgaccctgcaggctacgttgaagcgtttgcctgcatgctcgaactcggaggcttgagcgagggttcggcatcgatcggcgcaatagccgcttcgctttcgcttcgtgcgcttttggaagctccggctcgatccgttgtcgaggcgatgcgcattgcaggggctgatcgggcccatccgcttcgctgtcccgtatgcggcggcgagccgacgatcgcccgcgtgggcgagaccgaagcatcgcagggtcgcggcaaagagctttggtgcggccaatgcgcgacggcatggagcttcgagcgcgtgcgctgcgcgcggtgcggaacgcagaaccagagccgcctgcactactataacgtcgagggcgacgattcgcatcggatagccgtttgcgacgaatgcgaaggctacgtgcgcaccgtttaccagcaggacgcttccgcgccgttctccttcgaagtggaggacgtcgcgatggctccgctcgatgcgattgcgaacgacccgcagttcgcccgagtgcgcgaaggcgcataggcgcttgcgttcgagcgccgataccgaagaagggaggccttcgtggccgttgtcgaatacctgccgcctacgcatgcggcgcgaaccgaaaccgaggagcggcccatccgcatattcctcaacgaggtgccggtggcggtgagccagggaagcccctatgggcttcacgaacttgcggtgggctatcttctttccgaaggcctcatcttcgacagggaccggctcgttcgcgtcgaagtggacgagctgcatgccgaagtgtacgttgcgagcggcgagcgcgccgaagacggctacgtgccgcttcatcgcgtaacgtcggcgggatgcgctcaatcggccttgcttcgctcggggggagatgcgatcgcgaaacccgacgtgctgcataccgagcagcgcttcgacgccgatgcgctgctcgctcagatggacgagctctgcctgcggagtcctcggagaaacaccggggagtgcgtgcacggctgcggcctgggcgagggcggcgcggaatcgctcatgctcgtgcgcgaagacatcgggcgccataacgccatggacaagcttatcgggcaggcgtggctcgatcgggttgacgtgcgcgacaaggcgctgttcatcaccgggcgcatcagcgccgaaatggcactgaaggcgcatcgggcgggatgccccgtgctcgtatcccggaagtcggcgaccgatgaggcggtccggcgcgccgaggagcttggcgtcacgttggtatcccattgccgagatggccgcatgcgcgttttatcccgacccgatcgggtcatcggatagagcagctggatatttttcgaagaaaattgcataaagggggttacaaagcggtttcaaaccgcatatactgcgcttcagtcctttaaaagcggtacagagagaccgacaaggcttgcaagctgcactcaccttcatacgcagccagcaactcggaagcctttgtctgtcgcaaaggcattttttatgctttcgcgcagacggctgaaccgggcttcgaatgggagcctagagcgagagccacctggtcagtctgtacgcactcgaagaaagaaaaggagtgtgtatgaacgacaacgacaacgtcaaatccgtgtgcatggatgcggaggagatcgagcgatcgctgacgcgcattgcgcatcagatcctcgagcacaacaggggagcggacaacatcgcaatcgtgggcatcgtgacccgcggcgatctgcttgccaagaagctcgccgacaagatcgaggagatcgaaggcacgaaggtgccgctcggcaagctcgacatcagcttctaccgcgatgacttcctgacgcatctttcgcctgaggtccacgcaaccgacatcctcttcaacatcgacggaaaagacatcgtgctggttgatgacgtgctctacacgggccgcacgatccgcgctgccctcgatgccatcatggacctcggccgtccggcaaccgttcagcttgccgtgctcgtcgaccgcggccatcgcgagcttccgatccgcgctgatttcgtgggcaagaacgttccttcggcgtcggatgagaacgtgcgcttgttcctcgaagaagtcgacggcatttcggccgtcgagatcctgtcaatcgaaccgggctcgcgcgcgggctctgcaccgctgggaggtgaataaccgtggcgttcaaccatagacatcttatcgacatcacggagtactctgccgacgacatcatgctcgtccttgagacggctgtgaaattccgggaagtaaacgagcggaagatcaagaaggtccccacgctcaagggcttcacggtcgtgaacatgttcaacgagccctcgacccgcacgcgctcctcgttcgagatcgccgaaaagcgcctctcgtgcgacagcctgaacttcggcggctcgtccacttcggcggtcaagggtgaaagcctcgtcgacacggtggagacgctctgctcctacaaaatcgacatggtcatcgtgcgcgacaagcacgcgggggttccgcgccttatcgccgacgtttcgggcgctcatgtgatcgatgcgggcgacggcaagcaccagcacccgacccaggcgctgctcgacctgtactccatctgggagaagaagggcgatctcgccggcctcaaggtgggcgttgtcggagatatcgggcattcgcgcgtgtgcggatcgctcattcccgcactcaagatcatgggatgcgaagtgaccgtcatcgcgcctcccacgctcatgcccgcccgtcccgatgttctcggggccgaccatgtgacgtcgaatttcgacgaggcgctgcccgaactcgatgtggtctacatgctgcgcatccagcgcgagcggctcgagggtgcgccgtatccctccttgcgcgagtacaaccagctcttcggccttaccaaggagcgcgaaccgcttatgaaacccgatgcgatcatctgccatccgggtccgatcaaccgcggtgtcgaactcgacagctatatggccgaccatccgaaccgatcggtcattctcgatcaggtctatgcgggaatcctgacccgcatggccgaaatgtacctacttctgggagggagcgaagatggccttactgcttaagaacgcccatgtgatcgacccgcaggtcggtctgaacaaagtagccgatatcgtcgtgcgcgacggcaagatcgtggaagtcggcgagaacctgtccatcgagaagggcgtcgagaaggaccttgcaggcaagatcgtcgtccccggtttggtcgacatgcatgtgcatctgcgcgagcccggcttcgagcagaaggaagacatcgcgagtggcacgagggctgccgcgcatggcgggttcaccgcagtgtgttgcatgcccaacaccaagcccgtgaccgacaacgcgactgccgtcgagttcatccaagcgcgtgcaaacgcggttggcaagtgccgcgtgcacgtggcgggcgcttgcagccagggactcaagggcgagacgctttccgagatgggcgacatggtggcgcacggtgcggtggcgttcaccgacgacggacgcggcgtgcaagacgcgggcatgatgcgccgcgtcatggattacggcagcatgttcgatcgcgttgtcatgagccactgccaggacgagggtctggttggcgacggccaggtgaacgaaggcatcgcttccacgcgtctcggcatgctcggctggcccgccgagggcgaggagctgcagatcgcccgcgacatcgcactctgccgcttgaccgggtgcccgctgcacatccagcacatcaccacggcccgcggtcttgaactggtgcgcgccgcgaaggaagagggcctgcccgtcacctgcgaggtgacgccgcatcatctcttcctgaacgaatgggccatcggtgacgactacaacaccttcctcaaggtgaatccgccgctgcgcacgcccgaggattgcaacgcgcttattgatggcgtgatcgatggcaccatcgacgccatcgtgaccgaccacgcgccgcataccgcctgggagaagaactgcgagttcgaaatcgcgccgttcggcatgatcgggcttgagacttcgcttgcgctcatcatcacgaatctcgtggatccgggccacctcagctgggagcgcgctatcgagctcatgagcgtgaagccgcgcgagatcctgcgcgtcgagcgcgtggccatcgagcccggctgcacggccgacctcacggtcatcgatcccgaagtcgagtggacggtcgatgcggcggacttcttctcgaaggccaccaactccggcttcatcggcgaagagctcaagggccgtgccaccgatgtgttcgtcggcggctacgccaccttggaagacggcgctatcgtcgagtagacgctgctgcttgcttatcgtagcgggtcgggacgctcgaacgttccgacccgctagcgttttacaggttgtattcgggcgaggcgcattgttttggctgcggtacgctcggcgttgccggtcttcgatggcttcatcctctgaacacctccctcgatcgcacgcttgactcgttgccaaggcttttcggaggcagctagcgagaatgcgagcctgccgcctttcgatcgccgctctgccgcctttcggtcgccgctctactgcctcatggcaatccctcgaatccgtgagccgaattccgtatttttgccgaaaagaaccgatctgaaggcgcatggcggcaagccgatgccgaggctgattcggggtttgtaaaaggccaggtcaaaggtttgcatgatagcctactcaagcgacgtttctccagtagtcctcaacaaggccgcccaaacggagaaaatctcttcagatcggtgtttttcggtaaaaaacgaacaatcggtgtgctatattgcttcgaaaatgagccaatgcaggcgctcttcctttttcggaagctgcccgacggaaaccgacgccctcgtttcccttcacgcttgcaagatcctctcgactaagggctttcgaaggattgcgtcttatggctgactcgaacgtttacttcggataccaaaccgcattgcagattctgagagcggtcgattcgtcgaggcgcggcgttgcgcgatacgatgatcgcaagctgcccgatcgtgctcttggcggcgaggcgcttgcgggaatcatcgagcgtctctgcgcgatgcatccaggactgcacattgatttgcctgctcatgttctggtaggcggggatgcccatcggcgtttgtcgcgcgattgcaccgagcacgtgttttcggcatcgctttcgggcatgccgttctatcgcttggacaagggggtgtatgtagccgccccgcatctcgctttcaccaatatcgcatcggctgaaaagagccgggtcgccctgcaagagctggcttacgaactatgcgggacgtatcaaactcgaaggacgggggtcgtttctgcttatgacgtttcgcctctttcctcggtccggagtctgcgcgatttcgcatcggccaacagcgcgcttcgcggtgcgagaaaggcgggaagggcattgcggcacgttgcgaacgggtcggcttccgcgcgcgagacgaagttggcgctcgtttcggcgctgccttatgctcaaggcggctacaacatgggcgttcctcatatgaactacgaagtggaggcgagccccgccgctcgtgctatcacggggaaatccttcttccggtgcgatctttgctggccggatgcgaaggtcgccatggagtatcagagcagggaatcgcattccggcgaggcgagccgcatcggcgattcgcgcagggccaatgctcttgcatctatgggctggacgatcgtcgaggtcacgaacgacgagttggacagccttgccgctatggatacgatcgccgagacggtgtgccggcatcagggccgttgcctgcgaccccgcatttcggattatcgcgcgagaaagctgaagcttcgacgccagcttgcgcttcccgtgcgctgcgggtggtgaggtcggcgccgtgctaagggggtcttcgggctcttcggcttcgcccggcatcccgcgctcttcgccagcctcggcctccgccatcaaaaaagcgccccgaggaggcgctttcagcaagctggactatcggcgcttcttactcgaagcggctgatgaaattctcgacgacggcgaggcactcgtcgggatgcgtgacgttggcgacgtgcggcgcgccctggatgagcgcccattcgcagttggggatgaggtcgacgccctccttgatgacgaacggcgtcccctcgtcgtcggtgcctgaaagcgccaggcacggcaccttgatgttcttcacttcttcgcggatgtcccaatccttcattttgcccgtgaccacgaactcgcttgcgccctgcatgaccatgtagcattcgcctgcaccctcgttcgagtcgatgatgaaatcggggtagtccttctcgtacaagccgatcacgtggcgcttgtagtattcgtcataggcggctttcgcagcgggcgtctcgtagtcgccggtgcgctccgcttcggcgatggcgtcctgcatctcttggggcatgtacttgatcaggcggttcgcttcttcgagccaggtagcaatgcgcacgggggaggagttgatcacaaacgagttcacgcccgtgtcgtctttgagcatgcagcgcatgccgagcatgccgccccaggagttgccgaacaggtggatgtcgtcgagcccgagcgcctcgcgcacggcgtagaactcgtcagtccacagatcgtagttgtaaaagtcgtcctcttgatgggggatcgaggattttccgcagccgatctggtcgtagaacaccacctggcgcccgtatctgtcggccatgtctgcgtaggtcagaaggtagttgtggcagttgccgggcccgccgtgcaatacgagcagcgtctttttgcccggttggttctctccgacgatcttgcagtacgttttgaaacctctgaaatcgacgtattcttcgcgaatttctgccatgaaggctcctctcgattggcggtccggttcgggttgcagccgcaggcgggcgccgcgctgcggcgaccgggaccgtgcggtgcttgctccttgatgaaagtatgggcgaccgggtcagattttgcaacttggaacaagctgttcggaggtatcgggcccgggcggttcgcggagcgcccgcccggcgtgccgggagcgtcgccaaaagtcgaattctgcataaaactgtgcaaatcgccttttaaattgcatttctgcctagtaatacgcacgataggagtatacttgcattcgacctttaagggcggttcagagagaccgacaaggcgcgcaccacaacctatgatcagtgcctgtatgcgcccgctcccaaggggcgcttttttgtaggctgggtgcctaaacggaaggaagcattttgagtgaaatgagcgaacggttactgcggagaacctcgaagcctcagggagcgcctgcgctgctcgtcttggaagacggcgcggtgtttcagggttcggcatgcgcggcgagtggggaggtgttcggcgagatctgcttcaatacctcgctcgagggctatctcgaagtcatcaccgatccctcgtatgcgggccagatcatcacgatgacctacccccagatcggaaactacggcgtgaacctcgaagacgcacagtccgatagccccgcgctgcgcgggcttgttgtgcgcgacctgtgcacgacgccctccaattggcgtagcacccagagcctgcccgattacctgcgcgagcacaacgtcgtggccgtcgagggggtcgacacccgtgcgctcgtgcgccacgttcgcgacaacggcgcccagcgcgccgtgctctcgaccgtcgataccgatgcgaaaagcctgcttgccaaggtgcgcgcaagcgagtcgatcgtgggcgcgaaccttgcggccaccgtatcatgtaagagcgcctacgagttcgacagcctcccggcaagccatgcgttcgccgtgtcctctcccgccgagcaccgctacaaggttgtggcgtacgactgcggagcgaaacgctccattctggagaacctgcttcgcgcgggctgttcggttgtggccgtcccgtgggatactccggccgaagaggtgctcgccatggagcccgacggcgtttttctctcgaacgggccgggcgatccggaagccgtcgagggaacgtatctgcaggttgaaaagcttttggggaaggttcccgtgttcggcatatgccttggccaccagatgatctgcaaggcggcgggcgcagagatcgagaagctcaagttcggccatcgcggcggcaaccatccggtcatgaacctgcttacgggccgcgtcgagatcacggcgcagaaccacggcttcggattgctgttcccgagcctcggcgagcttgtgcccgagctttcgggcgggttcaaggggcatgaaagcgacctgagattctggacgaacgcacgcatcgcgcccgtggttcaaaatgagaaattcggccgcatccgcctcacgcatgtcaatctcaatgacggtacagcggagggaatcgccttgctcgatatcccggcgttctcggtgcagtaccatcccgaggcctcgccggggccgaccgacgcccactacctgttcacggccttcacccgtctcatggacggacgagatgattacctcgacatcgacatcgccgccgatcgcttggcgggatggacgttcggggagcaggctgcgacggtggccggcgcatccgaccgagagcaagattcgatgacggaaggggggcgctaggtatgccgaagcgcgaagatataaagaccattctcgtcataggttcaggtcccatcgtcatcggccaggcgtgcgaattcgactattcgggagcccaggcgtgcaaggtcctcaaatcagacggataccgcgtcgtgctcgtgaattccaatcctgcaaccatcatgaccgatccgggtcttgccgatcgtacctacgtcgaacccatcaccgccgagtttgttgaaaaggtcatcgaaagggagcgtcccgacgcgctgcttcccacgcttggcgggcagaccggcctcaatacggcggtcgaccttgcgcgttcgggcgtgctcgagaagtacggcgtcgagatgatcggctgcgaccttgaggcgatcgaacgcggggaagaccgcaagctgttcaacgactgcatggccgagctcggcatcgagaccgctcggtcgggttacgcctattccgttgccgatgccgaggcgatcgtcggggagctcggttatcccgtcgtgctcaggccgtcgtttacgctcggcggcgcgggcggcggcatcgcccacgaccatgacgagctcgtcgccatcgtggggcagggtctggagctttcgccagccgaagaggtgctcgtcgaagagagcatcgagggatggaaagagttcgagatggaggtcatgcgcgaccgcgtcggaaacggcatcatcgtctgctccattgagaatttcgatgccatgggcgtgcacacgggcgattccattaccgtggcgcctgctcaaacgctttccgatgtggaataccagcgtatgcgcgcggcgtcgctcgccatcctcgagaagatcggggtcgagacgggcggctctaacgtgcaattcgccgtcaaccctgacaacgggcgcatgatcgtcatcgagatgaacccccgcgtgtcgcgctcatcggcgctcgcgtcgaaggcgaccgggttcccgatcgcgaaggcggcggccaagcttgccgtgggttacacgctcgacgaaatcgtgaacgacatcacgaaggcgacgcccgcctgcttcgagccctccatcgactactgcgtggtcaaggtaccgcgtttcgcgttcgagaagttcaagggaaccgacgataccctttcaacgcgcatgaaggcggtcggcgagatcatggccatcggccgcacgttcgaggaggcgctcggaaaagccatgcgctcgcttgaaaacggccgagcgggcttgggcgccgatggcaagggcatcgagatcactgcggaagacgatttcgacgagctggtgggaaggcctactcaagatcgcatcttctacgttgccgaggctcttcgccgcgggtggccggtcgagaaggtcaccgaagcgacgggcatcgatccgttcttcatatcgcgtatggccgatgtcgtgaaaatcgaggaaaacctgcgcggcatccccctcgacgagctcgatgccgatgccttccgcacgctcaagcgctacgggttctcggatgtgcagattgcttatctgaccggatccgacgagatgaccgtgcgcacgtgccgtaagatgctcggtgtcaaacccgccttcaagacggtggacacctgcgcagccgaattcccaagcacgacggcgtaccattacaagacctacgatgtctgcgaaaccgaagtcgcgccgaaaacgaagaagcgcgcgatgatcctcggcgcggggccgaaccgcatcggacagggcatcgaattcgactactgctgcgtgcatgcgagctacgcgcttgcggaggcgggctacgagaccatcatggtgaactgcaacccggaaacggtgtcgaccgactacgatacgtccgacaagctctacttcgagccgcttaccttcgaagacgttatggacatcgtcgacgtcgaacagcccgacggcgtggtcgttacgttgggcgggcagacgccgctgaagctcgccaacgcgctcgccgatgcgggcgtgcccatcatggggacgagccccgaggcgatcgaccttgcagaagaccgcgatcgcttcgctgccatcctcgacgagctttcgatcacgtatccggctgcgggcatggcctccacgttcgaggaggcgtgcttggtggccgatcagattggatttccgctgctcgtgcgtccgagctacgtgctcggcgggcgcggcatggcgatcgtctacgacggcgcgcagctcgagaagtacatggccgaggctgcgaagatctctcccgatcatccggtgtatctcgaccgcttcctcgaaggcgccgtggaagtcgatctcgacgcgctttgcgacggcgatcgcgtgtatgtgggcggcgtgctcgagcatatcgagatggcgggcatccattcgggcgattcggcctgctgcacgccgccgtttgcgctatcggaagcagtgcaggaccagctgcgctcgatcgcgcgccggttggctttgcgacttggcgtcgtagggctcatcaacatccaattcgccatcaaagaccaggtaatctacgtgatagaggcgaacccgcgtgcaagccgcaccgtgccgttcacttcgaaggcaaccggcgtaccgcttgcgaaggtcgctgcgcgcatcatgggaggcgagaagatcgccgatctggacttgccgcccgacgaccgccgcctcgagcacttcagcgtgaaggaagctgtcatgcccttcggccgcttcccgggtgccgatacggtgctcggccccgagatgaaatcgacgggcgaggtcatgggtatcgcccgtaatttcccggtggcgttcgcgaagacccagctcgccatcagctacgcgctgcccgaaggcgaaacggtgttcatcagcgtgtgcgatcgcgataagcgcgccatcgtatccattgcgcgcgatatcgtgcgtctgggctttcgcgtggttgccacggcgggaaccgcgcgtgcgctgcgggctgccggcgtcgattgcgaagaggtgaagaagatccatgaaggcgaacccaacgtgagcagcctcattgcgggcggcgagatatcgctcatgatcaacacgccgttcggccatgcgacccgcgccgacggctacgagcttcgcctggaagccgtgaagcacggaatcacccaggtgacgaaccttgcgggggcgcaggccatggttacgggcatggaggtgtcgcgcgatgtgggcatcgatatcgtcgcgctgcaagatcttccccagtgggagcagtaagagaagcgatgcatgaaacgaaggcgccccgatcagggcgccttctgattgtcgggccagtcttttgcgcgccgccctcggcgatggcgggcgtcgcttcagtcgagtgcgggccgacggtctcgttggcgaattcgtctcggcagcatgttttgcgaaaacgcgcgcttacttcacaaaggctgcgaggccgagctcgtaggggtggtcgagaagcaaaacctcggtgccttcgggcttgaatctgagcagcttcaatacgatggccatatcccctccgcctccgattatcatgagcgcgccgacggcgaacagtggaatcgatcccagcgcataggatgccaagaccggaagcaggccgagcacgacggtgggagcgagcgcgccgatgatgtaggcgtgcttcggcaacggctcgctgcagctgcagtacggggtgaggtactctacgatgaagccgaacgagatcgccttgcgtccgcctttcgcgtagaggctccatacgaggccgtggatgagctcgtggacgacgatgaggacgatgaaagcggcaaggactccgagcgctcctgcgaaatcgaacgtgaggctgcccgcgggatggatggcgaagaaggcgatgccgagcacgatgtcgatgggcagcgcgatgccgagggcgaagatgttggcagcgacgatgcccatggtgaggcgctctttgcgatagccttgcattgcgaaggcggcctccgtttcctcgaattcttcctttcgcttgagttctgcaggggcgagcttgcgttcttcgttttgcatggtgttcccatcctcggttcgcagcgcttttcacttgcgtgaatgaatccaacattctgccatgaaaccgggttttgaagtctctgagacgcgtttgcctgcgaataaacgccgcaaatccaaatgcgcccgcacggcgcgcggcgcaggcgcgcaggcatacgcgcccgaaaacgcgcaagcgcggaatcagcgaaagggggtcgcgaagacgaattccggaatatgagattcttccttgcatttcgagcgggatggaagccgtgcggggcggggtgatacaatcatcagcatgtatgcgagcgccgcttgcgcggcgattggatgaaaggatgtacgtggctctcgtcaacgaacgggcgcgcgttctcgaaaacgaatgcgtcggcccgaacctgcatgttgcgaccctctcgtcgcccgctatcgcggcgggcatcgagccgggccagttcgtgcacatgaagattcccggcatggatgatcacgttctgcgcaggccgttttcggtctacgcgcgcgacgccgaggcgggcgtgcttgaaatcctctatcaggttgtgggattcggcagtgcgcggatgaccgagctggctgcgggagccgaaggcgtcgagctcatcgggcccgtgggtcgtgcgtggcagccgcctgccgaagcgaagcgcgcgttgctcgtgggcggcggcgtgggcgcagctcccctgttcatgctttgtgaggccctggtgaaaaacggggttcgtaccgatgtcgtgctcggggcccagacggagacggcgcttgcctgccgcggccgctacgaggcgctgcttgccgagccgccgcgctgcgcgaccgatgacggaagcttcgggcgcgaaggattctgcacctcgcttgtgcaagaagcgatcgaggaggcggctcgcgcgggagagccttacggctacgttgccgtatgcggtccggaacccctgatgaaaatcgtagccggcatggcggatggtgcggacatcttctgcgagctgtcgatggagcgcaggatggcatgcggtatcggcgcctgcttatcgtgcgtcgtcgataccgtcgagggcaagaagagggcgtgcgtcgacggtcccgtattcaaggcgcaggaagtggtgtgggcatgagcgtgaacatggcggtgaaccttggcgggcttaccatgaagaatccggtgacggttgcgtcgggcaccttcgccgcaggccgcgaatacggcgatttcgtcgatgtggcgaaactcggcgcggtgacgaccaaaggcgtatcgctcaacggctgggagggaaacgcatctccccgcatcgccgaaaccccttcgggtatgctcaattcgatcgggttgcagaaccccggtgtcgagcatctcaaaaaatgcgatttgccgtggcttgccgaacggggcgcaaccgtcatcgtgaacgtttcgggtcatagcttcgacgagtacgtgcaggtcatcgaggctctcgagggtgcggctgtcgatgcgtacgaggtgaacgtatcgtgtccgaacgtcgatgcgggcggcatgaccatcggctgccagaccgaaagcgtcgaggaggtcgtatcgcgatgccgtgctgccaccaaacgccccctcatcgtgaagctcacgcccaacgtgaccgatatcaccgagatcgcccgcgccgccgaggcatcaggcgccgacgccttgtcgcttatcaacacggtgctcggcatggcggtcgatgcgcgtactcgcaaaccgcagctcgcacgcgttgtcggaggcctttcgggccctgcggtcaagccgatcgcgctgcgcatggtgtgggagtgccatcgcgcggtacaggtgccgttgctcggcatgggcggtatctcgtgtggggaagatgcgatcgagttcatgctggcgggggctacggccgttgccgtgggaacggcgaatttcgtgaacccgaccgcaacgctcgaagttatcgccggcatggagtattattgcgaacagcaaggcgtagaaagcattaccgaactgataggagcactgcagtgttaagttcattcgaaagcattccggcgcgcgagcggatcatcgttgcgctcgactgcgaaattgacgaggcgttcgaccttgcggacaagcttcaaggcaaggccacgtggctcaaagtgggcatgacgctgttctatgcgaacggcccggcgatcgtctatgcgcttaaggaacgcgggttcaaggtgtttctcgacctgaagttccacgacatcccgcatcaagtcgaaggggccgccgcgtcggccaccggcaacggcgccgacatgctcaccatgcacaccgtcggcggcgtcgatatgatgcgcgcggcgcaaaagggagctgtgcgcgctgcggaagagtacggcttcgatgtgcctgttacgctgggaatcacggtgctgacgagcatgagcgaagaagggctgcgcgagatcggcgtgaacagggcggtggccgatcaggtggcggttctcgccgagcaggcaaaggtcgccggaatctcgggcgttgtcgcttcgccccaggaagcggccgaactgcgcgagatactcggccccgatgcctacatcgtcacgccgggagtgcgtcccgcaggatcggagaaaggcgatcaaagccgcgtctcaacgcctgccgaggcgttcgcggcaggcgcctcgcatatcgtgatcggccgtccgataacgcaatcggcggatccggcggctgcattcgagcgcatagccgccgagctgtaagcggcttttcgcaagcctttcgaggccttaaaacagaacggatgtttcacgtgaaacatccgttcgtttttttgattgaacgattaacgataaaaggggagaatctggcttaaagaatcggttgagccagatggggtcgttgctgcaaatatgaagttaataagttatatttacctgatgtacaggggataacgtaacgattgagcgacgaaagccgccctttcgcgaccgtatttctaaaatactgtgctgtagcgctgaatttttcggaaaaacaggtgttttgccctgcataattcctgattgcgtgctactatctcgaaattgcttttggagaagaaggagagaacattatggctatccctcagcttacccccgaagagcgtcaagctgctttggagaaggcaaaggctgctcgcatcaaacgcgctcaggttcgtgatgatctgaagtccggaaagctcactctcgagaaggttcttgagatgaaagacgatccggtcgtcggtcgcatgaaggtttccactctcattgagaccatgcctggttacggcaaggcgaaggcagagaagatcatgaaggaacttcagatcgctgagagccgccgtcttcgcggtctgggcgagcgtcagcaggctgccctgctggagcgtctcggctaaacagccacatgcgtcacggcaatctttttgtcatatcagggccatcgggtgccggcaagggcactctggtggcccgtcttttggatgcggtcgatgatgcgtgggtttcggtatcggtgaccacgcgctcgccccgacccggggaaatcgacggcattcattactttttcgcgtccgatgaggagttcgatcggttggtggccgaagacgggctgctggaatgggcgaacgtccacggatgccgctacgggaccccgaggaaaacggtggaggagcacatagcgaacggcgagcaggtgatcctcgaaatcgatgtgcagggtgcgtttcaggtgagggaatccatgcccggcgcccgtctgatcttcatcgagccgccttccttggaggtgcttgaggcccgcttgcgcgggcggggcaccgaaacagaagatgtgatcgaaaagagaatgaaaaccgctcttctggagctttcccgtaaaatggagtatgatatacggctggtaaacgacgacctcgacgtagcgacgtcggaattgatcgcctacatcgatgaacaagccgaatcgaactgaaggattataggtatatgagcattatcgaaccgaagatcgaccagcttctcaaccgaactgacaacgatcgttttctgctgtgctcgctcgcttcgaagcgagcgcatgatatcaacgacatgatgcgtggccagcgcgatcgcgcaatccagctgcagactgccgtggagattgcccgcgcagccgacaagaagccgctgagcctggcgttcaacgagatcgctcgcggcgaggtgtcgttcgaccccgagtcgatcgacatcaagaaccactaaaacgataccgtagttcatcttcgaaaatcccctcgggccgtatgcggatcaggcctcgggggatttcggtgtgtttggggcttccgattcgatcggaagccgatcggtcggcaacatgcgaaagggctgcacctgtgttccagagaatctgcctcgtccactaccacgaaatcggcctcaaaggccacaaccgcagctcgtttgaaatgcgattgctcaaaaacgtcgaagcgatgctcgacgggtatcccgttgtgaccgtacgcaagatctccggtcgggtgtgcgtattcctaaaagaggaaaccgaatacgaccttgcgtgcgaaattgccgacaagctcgcctgcgtgccgggtacggcccgcgtgtcgagcgggtacaagaccgagcgcgatatcgacgagatcggccgcgctgcggtcgacgcgatgcacgaggcggggcggttcgagagcttcaaagttgccgcgcggcgaagccataccgatttcgaaatagattccatgcagatgaaccagcttgtcggatcgcttctatgcgaggcgtttcccgagaagaaggtgcagatgaaagaccccgatctcaaggtatgcgtcgaggtcgtgcagagttcggcatacgtgtacgcccgaagcatccccggcgtggggggccttcccgttggaagcagcgggcgcgtgatgtgcctgctttcttccggcatcgattctcccgttgcgacgtggcgcttagcgcggcgcggcgcgatctgcatcggcgtgcatttctcgggcaggccgcagacttcggcgacaagcgagtatttggttgacgatatagcccatgtgcttgagaagaccggctgcattgcgcgcgtctacaccgttcctttcggcgaccaccagcgagagatagccggatcggtgcctccggggcttcgcgttatcatgtaccgaaggcttatgttcaaggtggctcaggcgctcgccgcccgcgagaaggcgggcgcgctcgtgacgggagagagcctgggtcaagttgcctcccagacgctcgagaacattgctgcaaccgattctgcggtgagcatgcccgttttcaggcccttgatcggaaccgacaagcaggagatcatagcccaggcgaaagagctcggaacattcgaaatatcgtcgcaagacgctcccgattgctgtacgctgttcatgccgcgcagccctgaaacgcatgcgaagctcgccgatgtcctcgaagcggaaaagcccctgccgatcgatgcctgggtggccgagatcgtcgaaaacgtcgaagtgcgcgattatgcatgccccgcgtacaaacccaagaaaccgcaacctgcaaacagctaggcactcgcttcgccaaaacccgcaaacccaggcccaaagcgaggcccggctgtcgttttaccgcattgcatctgcttgcttcgcgctgaattacgtgttcgcgttggatttgtgtcgtagacggtgtggtttcgcgtaacatcgccgcgcgaatcgggtgcgtttcgtgcaaaaacgaagatgcgcctgcatctcgaacgtgaaagaccgccctgctatgctttcgcataccgaaggcaaggaggtcggcatgccgttcacccaaagcgcggaatccctccgctcgaaactccatttgaccgatgcgaagacgtcgtcgatagtcggggtgtgccttgccgcggccattgccgtcgttttgatggttcagagcgcaatcggcctcgcctcaaacgaaagcacagaggtgatcagggcgaaagatgccgcatctgcgacggggggagatgcaggcgcggacgcgggtgcggacggtgccgagggagatgttttgcatatctacgtgcatgtggcgggggcggttacgactcccggcctgtacgaactggcagatggctcgcgtgtgcaggatgcgatcgacgcggcgggaggctatgccgacgacgcggcgacggcggttctcaaccttgcgcgcgtggtttccgacggcgaacagatcgtcgtgccgtcgatcgaggcggatgctgcggatggcttcgggcgggagccgggcgaagatgctgcgggcggtgcgccgtctgcagcaagcgctgcagacggatcggttatcggcgggaaggtgaacatcaacgtcgccgatgcctcagcgctcgataccctgccggggataggggaggcgactgcagagaatatcatcgccgaccgcgaggcgaacggaccgttttcgagcaaggaggacctgcagcgcgtttcgggtatcggagcaaagaagtacgctcggctcgaagcccttatctgcatcggctgacggtgcgaaaaggaacggtgggcgatggggttcgaagcaaagggtgcagccgtatcgcgcgggggcagggcggcggataggcgggcgatacggccatcgtttcccccgacggttccgcttgccgtatcatggtgggcggcagcggcggtggcattcgaatcgtcgggcatccttgcgggagcttttcgatgcggtgcggtttgcgctgcgctggtttgctcggctggcgccctcgccgcatttgcgttcgcccgcgaccgcgcgtgcatcaaaaccgccttgctggttgtcgtcggatgctctctcggcgttgcaggcgggctgttgcgtgcaacgacgttcgacgaacagcgcgaagcggtgctttcgatgccgtcgggaacctatatgctgagcatggcggccgatgcgcggtcgggcgatttcggaccgacgtgttttgccgatcttcggcttcccagtggggcgacggcgaaggtgagtctgcggtatccatccgattgcgggatgctccgatacggctgttccttcgaggcgaacgtgcgcttttccgagttttcggaaacgtcggcggcgtactaccgcaggcagggggcggtcgccgtggcaacggcgagcgatctggctcgcgtggagatgggcggcatccgcggctcgctcgtcgccctcagggagcgggcgatcgccttgttcgatggctacgagggccgcggtgcggcctttctcagggcgatactgctcggagatcgcagcgcgcttgatgacgatgggttctaccgcgacgtgaaggcgatcggcttggctcacgtcgttgcggtatcgggcgcgcatctgtctatagtctctgcgcttatcggcctcgcccttaaggcgatgcgcgtccctcgggcggcagccgtccctttgcaggtgctgttcgtcgtcggatacctcgtatgcacggcgatgcccgtatcgggtgtcagggtcgccttcatgaccgccgttgccttgggttcgttttacgcgcgacgtcgagcgtcgggcatcggcgcgctggcgctgtgcgtgtgctgcgtgctctgcatctccgccgaagcgtccgtctcgatctcgtttgccctgtcggttctggcgacggcgggcatcgttgtgttcggggggctggcgagaacatggtgtctggccgcgacgggcggtcgcttttccgtcctgtgcgaatcgatggcgctcacctcatcatcgggaatcttcaccatgccgctcgccgcgtcgacgtttgcccagcttccggtgatggctccgcttgcgaacctctgcgcgatgccgtttttcgcgctgttctgcgggggaggccttgcagtggtggctctgtgcgaggcggctcccgaagcgttcggctggatgctcgatgcattggtgcttgcggctcaggggttttgcgagggcctgggccttcttgccgatgcgcccctcgcatccgttccctgcgacgtatcgcttgcctgcgcccttgcgataagcgccggtactgcctctgttgtatgggcgaagtggccgcagccctcgcgcaggagcgcagcggttggcgcaagcgccgccgtgctcgcgcttgtcctggcggcgtttccggccctaacgtaccgcgaaaccgaaatcatcatgttggatgtggggcagggcgatgccatcgtcgtgcgaagcgggggagcaaccgtgctcgtcgataccggcaaccaggacgcgaagcttttggaggctctcgcccgaaacaaggtgtattctctcgatgcggttgtgatcagccatcccgacgacgatcattgctcgtcgcttgcagcgctcgatggaacggtgggcgtcggagcggtgtacgtggctgaggatctgctcgattgcacctgcgcatcctgctcgaagctcagggccgcgactgcggccctcgttggcggcgatcgcgtttcgggccttgcggtgggcgatgcgctgcacgtcgggtcaattgatctcaccgtggcgtggcccgacgcgtttgcagacgatggcggcaattcggatagcctgtgcttgctcatgacatgcggcttcaacgacgatggaacggggtggacgggccttctgtgcggcgatgcggaagacgagcagctcgatgccatgatagccgccggcaggctcggaaaggtcgatttgtacaaggtcggccatcacggatcgaaggaggcgctcgacgaacagacggcatcggtgctctcgcctgcgatctcgctggtgagcgtcggcgaggggaaccgctacggccatccggcaccccaggtcctggctgcgctcgaaggggtggaaagcagcgtgtacagaaccgaccaggtgggggatgttgtgtgcagaatgaccccggatgtcctcgaggtcgcgacgctgcgctaaaatgatcgcatgactactgagaaaaaagacgcgctccttcccgcatacctcgtaaacggggaggatgaactcaaacgcgaggccgtgctcaaacggctcaaggcgagaatcgccaagctgggcgacctttcgttcaattcggatgctttcgacggggagcgggcctcgggggccgatatcgttgccgcctgcaacacgatgccgttcgcaagcgatgcccgcctcgtgctcgtgcaggcggccgacaagctgaagaaagcagattccgaagccctcgtcgagtacctcaagtcgcctgcgaccaccacggtgctcgcgctcgtcgccgacaagcttgcgaagaacacgcgtctctacaaagcggttgccgcgctcggcaaaaccgccgtcatcgactgcactccgctcaagcgctacgagctcccgaaaaccgtgcgctcgcttgccgtgggccacggcataaccattaccgagggagctgccaaccaacttatcgagctcgtaggcgaaaacaccgtgcatctcgatagcgagctgaaaaagatcgcgcttgcgcataggggaaacgatgcggtcaacgagcacgagatcgtggcattggtcagcaggacggcggaggtgaagccctgggagttcgttgacgcgttttcgagccgaaaccagaagaagtgcctttcgtgcttgcaacgcatggaatcgacgtcgccccatgctcttctcgccatgtgcacggctcggctgcgcgagctcatatgcgcccgctcgcttgcggcgcgcggggccgagcggactttggcggctacgctcaaaatgccggattggcgggtgaagaaccaccttgcatgggctagggcgtataccgccgaggagcttcgccgcgctctcatcgcagcgcgcgacaccgaaaaggccatgaaaagcggtgccgaccccgacgacgcgtttctcgattgggtgcttgcgacgacgaaacgctaacggcgttcaggaggtttcgacgcggcattttcggctgactttcgtcgcagttgcgcggttcgtcgaggcagcggtatgcgaggatgatggagattcgggcgaaaccgcgcatgggatatgcgtggaacctgcaagatttctcaagatcccccttacaaaggagcagaacgtttgctattctatcgcattgtgtattcagcgatacgttcgcgcggtagccgataccgccgagtccgcagacgtggctgcgctatggatttcgtctcgctggttgaccgtatggtctgaaaaacagaaaatcccgctgtttttcgtgcatcgcaaatttcatgcgcccgacggcgcatcgaagggtcctccgaggacttcttgcgaagcaatcgacccggtcggcgaccgcgtcccgcaagggcaacgcgatcgaatcgttggatacaggaaatcgattggtttcgtgagatattagtttgtgattcattggaggaactacctacatggctaacattaaaagtcagaagaagcgcatcaagaccaacgagaaggcccgtctgcgcaatcgcgccgtccgctctgagttgaaaaccgcaacgcgtgcggttcaggacgccgttgccgccggtaacggtgcggaagcttatgctgccgctctcgctgcatgccgcttgatggacaaggccgcttccaagggcgtcatacacaagcgtcaggccgccaaccgcaaaagcggtatcatgctgctgatcaaaaccgttgtgacccccgaggacatcgccgcctacaagcctgctgagaagaagaagcccgaggccaagggcggctcgaagaaatctctcgccaaggccgagaagaagaaggctttggaggctgcggcaaaggagaaggcgaagcgtcgcgccgagaccgagaaggcacagaaggccgctgctaagaagaaggcggaagccgaggctgccgccgctgccgaggaagccgcttccgaagaggccgccgaataacaggttcgaaccgtttcgggttcatccgcatatcaagtgaaaaaggcccatgcgggcctttttcatgcccgcatgcattgcggtgcgaaggcgcctgttcggcggattcgtgaaaaccgatgcacttccgaaacggtgccttgcggggaggcgatcctcggctatcatggaaagctacggataatcgcgccgaaagcggccatcgtgcggcgcacagagcatttgaaagataggacatgacccaagacccgaagtacattcgcaatttttcgatcatcgcgcatatcgaccatggcaaatcgacgctttcggaccgtatcctcgagttgacgggcacggtcgcatcgcgcgatatgaaggaacaggtgctcgattcgatggacatcgagcgagagcgcggcataacgatcaaaagccaggccgtccgtgtcgactaccgtgccgatgatggcgagctctaccagttcaacctgatcgatacgccgggtcatgtcgacttcacctacgaggtgtcgagatcccttgcggcatgcgagggcgcggtgcttgtagtcgatgccacgcagggcgtcgaagcccagaccgtcgccaacgccatgatggcgatgaacgccgatctcgagatcatccccctcatcaacaagatcgatttgcccgccgccgatcccgagcgggtgaggcaggagatcgaagatggcctcgcgatccccgccgacgatgcggtgcttgcgagcggcaagacaggccaaggcgtgcatgacctgcttgaatcggttgtctacaacattccctccccagagggcgatccgtcggctcccctgcgggcgctcatcttcgattcgtatttcgatgcgtatcgcggcgtggttgcgctcgttcgcgtggtggacggttcgatgaagaagggcgaccgcatccacatgatggcaaccggagtcgatgcgctcgtcgaagaggtgggcgcgcgcaagccggcggaaacccccatgccccagctttcggttggggaggtgggctaccttgtaacgggactcaaagacgtctcgcatgtgaaggtgggcgacaccatcacgacggcgtcgggcggcgtgagcgatccgctccctggataccgcgaggtcaagccgatggttttcacgggccttttccctatcgacggagatcagtacgagccgctcaaagaggcgctcgagaagctttcgctcaacgaccctgcgcttatctgggaacccgagaaatcccatgcgctcggattcgggtttcgcgtgggatttttgggtttgctccacatggaggtcatcaaagagcgcctcgagcgcgaattcggactcgatcttttggcgacggcgccttcggtcgaataccacgtgtacaagcagggaggcgaaatggtttcgctccattcgccccaggaaatgcccgatcccggcgagatcgagcgcatagaggaaccgtacctcaaggcgaagatcctcatcccgcccgactacgtgggcgcggtcatggatctgacggtggcgcgccgcggcacgttcgttacgatgaactacctgtcgaccacgacggtcgagatgctgtgggagatacctttgtcggaactcatcatggattacttcgacaagctcaaatcgaacacgaagggctatgcgagcctcgattacgaattcgacggatacaaggcttcgaagctcgtgaagctcgacatcctgctatcggggaagccgatcgacgcgctctcgttcatcgtgcatcgcgacaaggcttacgaccgcggccgcatactcaccgaaaaactcaaggagatcattccccgccagatgttcgaagtgcccatccaggcggctatcggaggcagggttttggcccgcgagacggtgaaggccaagaggaaagacgttcttgccaagtgctacggcggcgacatctcgcgtaaacgcaagctgctcgagaagcagaaggccggcaagaaacgaatgaagagtattggaaacgtggaggttccgcaagaggcttttatggctattctgaaggtggacgactaacgggccgtcttcgggtagactggcaaagcggcccgcatggggtcggctcgatacgatacgaaaagcgaatggtatggcaaggaagcaaaaacaagattacgattggctcgacgatccgttcgatgaccggaagaaccagaagccccagggcggctgctccgggattgcgctcgtcgctctgattctcgcagtggttttggtagccgtgctcggtttcgtggtcgtcggaagcctgggcgtcctcggcgacgtctacagcgggtagccggcagcgggcgggtatcggagcatgaatacagcgctcacgtcgttcttcgaggcgcatcgcgtgctgctcgctcccatggcgggcgtttcggatacggcgttcagaactctgtgccgagagaagggcgccgacctcacgtacaccgagatggtttcggccaaaggcctttcctatgcgaacgagaagacgcgtcgtctgctcgagttggcggaaggcgagcagacagtcgccgtgcagctgttcggccacgagccggaagtcatggcgcaacaggccgtatggatagagcgggagatgggaagctccctggcgtatctcgatatcaacatgggctgtcctgcccgaaaaatcgtatcgaagggcgacggcagcaagctcatggagacccctgagcttgcccgcgagatcatcgagcgcgtcgtcgattccgtttcggtgcccgttacctgcaagttcaggaggggttatgcgcttggcgaggaatcagccgtttcctttgccatgatggctcaggctgccggggcatcggcggttgccgtgcacggaaggtacgcgatgcagtattacagcggcagcgccgattgggacgttatcgcaaaggtgaaggacgccgtgtcgattcccgtgatcggaaacggcgatgtgcgctgcggggacgatgccgtggcgctcatggaaagaacgggatgcgatgccgtgatgatcgcgcgcgccgccgaagggaacccgtggatattcgccgacgtgaaggcggcgcttgcgaagtccgagcgccccgccgcgcctgatttcagggagcggctggatacggcgcgccggcatgccgcgctgctggagcggcgcggcgagaagaacatcgtgcgcatgcgcaagcacgccatgtggtacctcgcagggctgccccacgcctcggtcgcccgcaagcagctcaactcgtgctcgtcgcttgcggatttcgatcgggtcttcgacgagctgcgaagggctatcgaaggagaagataaacagcatgtatgatccgtacaaggcgctttacctgcatataccgttctgtaaaaaacggtgtgcttactgcgatttcgcaacgcaggctatcgagagggaaaacccggcggtgtccgaatacatcgacgagcttgtgcttgagatcaggcgggcatcccgagagggaaagctcggcagcatcgagacggtctacatcgggggaggaacgccgagccacatcggcatggcgaacctctcgaaactcctctacacgctctcgacttcgcttcatctgacgcccgaggtggaatgcaccatggaggcgaatcccgaaagcctgaccgagcccatggtgaaggatctatgggcgctcggcgtgaaccgcctttcgatcggcgtgcagagcttcgatgacgagctgcttgcgcggctcggccgcgtgcacgatgccgaagaagcgaagcgtgccatagcatgcgcccagacgcggttcgaaaacgtgagcatcgacttgatgtgcgggatacccgggcagggcttcgagggatttgcggctgatttggagacggccatcgcatccggcgttgcgcacgtaagcgtgtatcccttgagcgttgaggagaacacgccgctcgagctgctcgtcgagagcggtgcgctcgaggcgccggtggaggacaaccaagccattatgatggagacggcgctgagggtgctcgacccggcgggatatcgccgctacgaggtggcaagctatgcgaaggcggggttcgaatgccgccacaacaaggcgtattggacgggaaagccctatctcgggttcgggacgtcggcggtgaccatgacgcaaaacgacgcgcgccgcatgcgcgttcaggatggtcaggtgatcgacgatctcgatagaaggcagaagtgcgccgaagaccttatgctcaaaatgaggatggtgcagggggtaagcgaagagcaggtgcgcgaagctgcgttgcttttgcccgaggccctggcggtttttcgcgggcttgtcgaaagcggtttggcggagcgcctctgcggccgttaccgcccgactgtgatgggctggctttgcggaaacgagctctacggccgcatattcgaccttgcaccgtaaggcgccgatgcggggtttgggaagcggtgcggcgccgttcgctgtggtgcttgcgtcaagatatcgagaaatcataagaatgattagcactcaacgggcgaggctgctaaaatacgtggttagctttgcgttggcgggatagacggaaggaaggcaagcggtgctctctgacagacggcaacgggttctcagcgctctcatcgaagagtacgtcgcccgtgcgcttcccgtcgggtcgcgcacgcttgtcgagcgttatcagctgggcgtgagccccgccacggtgcgcaacgagctttctgtgctcgaggatgcgggctacatcgtgcagcctcatacgtcggcgggacgcattccgaccgatatcggataccgcgcattcgtggacgacctgcttgaaagcgggctggctaccgacgagctgccctacagcgatgcgatcgaggagctcaagcgcagcgcaagcgagctcgacgatctgatcgagcgaacatcggtgacgctcacgcggctcaccgattgcctctcgatcgtgctcgcgccctctgtattggcgctgcatatccggcagatttcgctcatatcgctcaacgcatacagagcgctcgtcgttctcgtcaccgaagacggacaggtgctcaaccgttcggtcgatttccccgaagaggtttcttccgacgatttggcgtctgtgcagcacctcctcaacgacgtgttcgccggacgatcgctgagcgaggtgagaacccgaatcgatctcgaggccgccgaggcgctcaacgatccgctcgtgcgccttgtgctcgaagaggtcatgtactgcctgcaggagagcgagacgggcagagcccatcgcatcggcgtgagcacgctgctcaaacaaccggagttcagccactcgcaatcccttctccccatcatgcagatactcgaagacgatgcggtgctgctccatgtgttcgacgacgccgtcgcgggagcgggtccgctcgtgcgcatcgggcacgagaacaacgacgaagcgctatccggcgtttcggtggtggcaacccagtacgggcgcggcgaggctgcgggcgtggtggccgtcatcggaccgacgcgcatggattattcgaaggtcatcaaagcggtcaggctcgcgcagagcgcgctgcaggacagctgatttcagattgtagaaaggtatccgaagcaatggccaaagacctctacgaggtgctcggcgtctcgaaaaacgcgagcgaagacgagatcaaaaaagcgttccgcaaacaggcgcgggagttgcatcccgacgtcaacaaagcccccgatgccgaggaccgcttcaaggagctcaacgaagcctacgatgtgctgagcgatccgaacaagcgggcccagtacgatcggttcggcacgatccccggtgcagcgggcgggggaggcgcaggcgggtaccagtacgtcgatttcgaggatctgttcggcggcggcttcggcatgggcgatctgttcagctcgtttttcggcggtgcgggcaaccatgccgtcacgcgcaaagagggccgcgatatgggtgttggtctcaggctgacgcttgaggaggttgcggcgggcgccaaaaaggaaatcgtgtacgacaggctggctccgtgccctgattgcgagggaacgggcctcggacccgatggcaaagaggtcacctgccccgaatgcaacggccgcggccgcgtcgtcaccgtgcaacataccttcctcggcgatatgcaaacggcgcagacctgcaaaacctgcgggggaaccggaacgacgatcgacaatccgtgccctgagtgcgagggccagggtcgcgtgcccgaccggcagcgcgttaccgtggaggtgcccgtgggcatccgcgatagccagcagctgcggctttccggattcggggaggcgggcatgcaaggtgccatggcgggcgatctcatcgtcacatgccgcatccagcctcacgagttcttcgaacgcgaaggcgacaacctccatgcccgggcgaacatttccatcgtgcaggcgacgctcggcgcggagatagagatcgacggcatcttcgaagacgagatcgtaaaggtgcgcattcccgaaggttgccaaaacgaacagatcgttcgcgttcgcggatacggcatgcctcgtttcaagagcgagaaccgcggcgatatgtacgtgcacgtgaatgtcgtgattcccaagaaggttacgaaaaagcagcgcgaactgctcgagaagcttgccgaagagatgggcgacgacgtggccgaggagcgcactccgctccaaaagctgcgcgacgtgttcaattaggcgacgtccgttcatggcccttcctcatttctacctcgaaaaccaggtgctcgcccaggagacggacgcggtcttcgcgcttcggcttgccgacgacgatgcgaagcatgcgcgtgcactcaggcttgcgccgagcgagcacattgcagttatcgatgcggctaaagattacttcgagtgcgagatcgtctcgttcgatcgcgacggatgcctcgtgcgcatcgcgcagaagatcgaagacgagcgtttccgtccgactgtggtgcttgtgcagggaatcgcgaagggcgagaagatggacggcatcatccgccatggaaccgagatcggcatcgcggggttcgtgcccttggcatgcgagcggtccatcgtgaaactcgacgagaagaaggccgtcgcgcgcacggagcggtggcgctcgattgcaaagagcgcggccatgcaatcggggcaacccgatgtacccgatgtgtgcgagccgatggggctttcggccgtgtgcgaattcgcgcgtaacgcccatgcggtgctcgtttgctgggaagaggcctcgtcgggctcgatcagagctgcgattcggggagcgctcggggcgcagagggtcctgcccgaagacgcgcgcgtgatcgtggtggtcggtcccgaggggggcttttcgcgccgcgaggtatcagcgctgtgcgatgcgaacccgttcgcctcgacggtcagtctgggcccctcgatcctccgcactgagacggctggccttctggcgcccgctctcgcgatatacgagctcggtggtctttcgtgaagtatgcgatcgtaaacctgggttgcaaggtgaaccgcgtcgaatccgacgaccttgccctttccctcgagcggcttggaatgcagcccgtcggccgcgatgcgaaggccgaatccggaacgctgcgcgaagcgggcgagggtcgctgcaacgccgatctagcggatttcgtcgtggtgaacacctgcacggtcaccggcgaagccgagaagaaaacgcgcaaggcggtgcgccgtgcgcttcgcgagcatccgggagccgttgtcgtcgtgacgggatgtgcggcggccatcgacgctgcggtattcgaatcgatggacgaacgcgtcgtcgtggtgggcaagcgcgagatagccgaggcctctcagtcgggcgaggcgctcgggctgctgatccccgcgcttgcccgggatctgcgttcgcggcctcttttgtgcggcgaacctgcggatgcggcacttgaagagctgagggtgggcgaaggctttcccacgcgggtcggcatcaaggtgcaggacgggtgcaacaacgcctgcacgtactgcatagtccacgtggcgcgagggagggcgtggagccgaccggccgacgaggtggtccgcgagtttgcgcgctacgcctcttcgggcgtgaacgaagtcgtgctgtcggggataaacctcggcacgtatcgcgacggctcgaccgatctcgccgagctgctcatgcgcttgctcgatgcttccgaaacgacgcggatcaggatttcgagcatcgagcccaaagacgtcggcgatcggctgatcgagctcatcgcgcagtcgggcggcaggattgcacgccacctgcatctgccgctgcaatcgggcagtacgcgcgtgctgcgcgagatggcgcgcccctattcggcaaagtggtactgcgatctggtcgatcgcctataccaagccgttcctgagctctcgctttccaccgatatcatcgtggggtttcccggtgaaaccgagacggatttcgaggagacgacgagggtgtcgcaggcgtgccgattttcgaaaatccacgtctttccctactcgaagcgcgccggaacacctgccgccgagcgccttgatcaggttgagcctgaggtgaaagcgacgaggtcggctcttctttcggagttgggcgcccgtttgcgcgaagaagcgtatgccaaacggaggggcacgacggaaaaggtgcttgtggaagcgtgcggcaagggcatgacggaaagctatttcgagatttccgtgtccgacgaatacgctgtgggcgatttggtgtccctgatcctgccataggagcacgtagctttctgatcgggtgcaatccccgtatgcgctttccaaaacttgggaaaatggacgtagcgctcctcgcgctcatgcgatatgattatcaaaatagtcagcatagccgtttcggcgattacgtaggggcacatcaaggaaaagagaaagtcatgtcgcatcatcttcgcacgtggggagcatgtgcgttaacgctcgttttagcttgctccctcgtcttctcgttttcgggttttcccgcgttggccgaggggtccgacgccgcacaggatcaggcgatttccgtgcaggaacccattgtggaaatcgaaattcaaaaagagtccgcagataaggaagaacccgaaaacgacgaaacatcgctcggggccgaatcagcaccttcgggtgacgaggcgtgtggggaaaccgtcgaagggaaggatccccaagaatctccggagcagcagatcgctcgaagcaaccccgttgcgacgccggtcgaaatcgaagaaacccagcctgctgcaagcgtgctcgtcgaggggtcgacggtgtatgcgaacggcgttgccatttgcataaagaaagatgccgatggaaaagtctacgtgtacaatgcggacggcaccgaaaagctccttcccgacccctgctctccgtcgacggtatacggaggcggcaagagcgcacctgttgagggcgatacgagcatcacgatcgatggtgcgagcgtctcgaccgtgtacggcggcggcaaaaacgcttccgtcgaaggaagcacgactattgcgataaagggagcgaaggtatcaagcgtatacggcggcggctactccgacgggagctcttcggccgacgtttcgggcgatgcaacggttctgatcaccggaaacatcgatgcggggcaggttcatggaggcggatacgcctatgcctcaaaaggaaacgcttctgctgacgtcaacggcgctgtaacggtaagcattcctgcccagccgacttcgaaccacgggaacattttcggcggtggaaatgctttttccattggatccaacaacgcttcggcgaatgtgggctctgtgaaagccgatattgtcgggcgtacgtattcgctgcgcggaggtggaagcgcttcgcttgcttcgggagcgacgggcgcggcggttgccgacgtaacagggtcgatcggcttggcgtttaacaacgtagacattcgcgaggtgtacggggcgggatccgccgacgggccgacggctcatacgactgccggatcggtgtcgatctctatcgacggcacggaagccatgagcgttaccggtggtggaacggcatataaatcgggcgttgccgacgtgtatggggcgacgagcgtggaaatccgcaattgcagcaacctgtacggttacatctacggcggcggcgaggcgtactcgggtggcaaaacgcgagtggggtccgcacgtgtttccgtcgagtcctcgacgtatccggtcgacgagcagttccccgaatactacgcggcgggatcgacgatcgcgggaggcatggcctcgggccaagattcggatgcgagcgtgctcggcgacgttttcctctcgctttccgattgcgaaagcgccggtggaatctacggcggcgggagggcatcgcaggggggccgtgcaaccgtcggcaactccgacatctcccttgcccgaatgacgaaagcggcatacgaaggcatgcagttctcctgcagcctgatagcgggaggcgaagcggacgattcggatgtttcgacagtggattcgagctcgatttccgtttccgtagaggattgctccctggaatacctggtaggcggtttcgttgttgccgacgagcccgtatcgacggcatgcgcaagcacgctcgacatcatcggctcgggcaataggatacagcttctcgcctgcttcgatgcggcctcgctttcctcgacgctctatcttgacgagttcgtggagaaagcagccggcaaaccgcttagactgacggttgccggcatttccaaagacgatcccgtggtcgtctgcaaaggcgatgcatcgcgatcgagttggttctcccgcgtcgagggaagccttcgctatgcgatagagcacatcgatgggcaggcagcttcagtgtggcgcttgggggaggcggcaccgcccagcccggggaaggtcgacatggtcgtttccggcgactcgggtgttcctgccgtatccgtcgatgtggatgaggactttgcagaacggctgcttaccgacgaagatcgcaccgcgttgaggcagggatcgctcatagagttcttcttccgtgcggatggaatcgatgagataccggccgaggtcgctcccgttgtcgctcaggctctggaaaagcattcctgcacgttgctgcagcacgtcgatgtcagcctgataaaatccgtcgacggcaccgagacgccgatctcgtccatcctgcaagcgggtttgtctgcgcgattcagcgtagacgttcctcgggatgaaatcatcgagggccgcacgttttccgttttgcggttccatgtgagagacgatggcacggtggaagagaaactgctccccgatctcgatgacgatccggctacggttaccttcgagaccgatcgcttctcggtttattcggtcgtctacaccgaatccgggcacgatggagacggggaaccgggagaagagggaaagccggagaatccaggcgacacgcccggtaccggtgatgaatcggggggcggcgcagacgggaaccggggtgcggacgatactggaaaacccgcatcgaaaaccggccagggcaacatccatcggcttggagtgctcaaatcgtcgctcgatccctcgacgggcgatgtgtctgctgcgtgcatggcgctcgttttgggtgtcgcggctataggagtcttctgcgcttgcgccattcggctgagggcgggactgcgtcacaggcgccgatagcgctccctcgaattcggtgattgcgccggtcggtaacggcgcaatcgcaggcggtgtcggtttggttacgtcgcaatgccttccagggtcgcatggtacaatgacgtcatgacagatcaaacgcaaatcaccctaaccgcccccgataacgtgagcatggcccgcatcgtcggacaagccgacgagctgcttcatgccgttcaggatgccttcggcgcccgcatcaccgtcaggggcaacgccatcgagctttcgggagatccgctcgaagtgcaatcgctcacggcgcttttctccgatatgatcaagatggttgaaagcggcaacgagccgaacctcgagtacgttcgccatgcgatcgacttgctccatactgcggagttcgccccgcaggcgctgcgcgaggatattctgctcacgtatcgcggccgtgcgatccggccgaaaactgcgggtcagaaacgctacgtcgatgccatccgcgagaatacgatcacgttcggcatcgggcctgcgggaacgggcaagacctatctggccatggccatggcggttgctgcgctcaagcgcaaagaagttggaaggatcatcctcacgcgccccgtcgtggaagcgggcgagagcctcggatttcttcctggcacgcttaccgagaaggttgatccttacatcaggcccctctacgatgcgctgttcgacatgaccgacatggagaaggcgaaccagctcatcgaaggcggcgttatcgagatagccccgcttgcgttcatgcgcgggcgaacgctgaacgatagcttcatcatcctcgacgaggcacagaacaccacgcccgagcagatgaagatgtttttgacgcggctcggattcggctcgaagatggtcgtgacaggcgatgtgacgcagctcgatctgccgcgcggcatctcgggactcaaaaacgtacggagcattctcgagggcttgtctgacattgcgttttgcgattttaccggcaaagatgtcgtgcggcattccttggtcgccgctatcgtcgccgcgtacgactccgctgaaaggaagcgataaccatggatatacaaatcgattaccagcatcgcaaggaagaactcgaagcgctgcccatcgaagggcttgcgatattcgtgctcaaccacgaaggcaagccgttcaataccgaggtatccatcagcttcgtgaccgacgaggccatcgccgatctcaacaagaagtatcggggcaaagagggtccgaccgacgttctctcgttcgaatgcgatgggcccgacgaagacctttccgccatgttcggcgtggaggaggctatgctcacgctcggcgatgtcatcatcgcgcccgacgtcgccatccgtcagacggcggagttcggcacgactttcgaagaggagataagcctgctgctcgttcacgggctgcttcatttgtgcggttacgatcacatcgaagacgacgaggcggagcgcatggaaagccttgaatcggagattctcgaagcatggaccgagcgccgagccgccgtcagcacggcgggcgcgtcggcggcgcagtagaatatacggtaggataaagggaagcgacagaggatcgtggggcggatgcgcaaccgattcgttcggaatgcgaaggacaaacgtcaaggcgagcgattttctctcgccaatgcctttgcgtgcgcaacctgcgggatcgcccatgtgttcaaaacgcagcgcaacatgaaaatccatttggccgtggcgcttttggcactcgtcttcggaatcgtgttgcagatcgaggcgtgggggtgggccgccatcgctttggcgatcggccttgtcttcgcgttcgaatgcatgaacacggcgctcgaggcggtcgtcgatctcgtttcgcccgagtactcggaattggccaagcacgcgaaagactgcgcagcgggagcggttctcgtgtgcgctctcggtgctgtcgcggtggccgcagtcgtatacgttccgcccgccttggctttggcgggcttgtaggaggaatacatggatgatgctgtgcaacatgatgagacgatgccgttccgatcgggattcgttacgttggtgggcaggccgaatgcgggaaaatccacgctcatcaacgcggtgatcggcaagaaggtggccatcacttcgaatacggtgcagacgacgcgccatcggttcagggccgttctcacacgaccggggtttcagcttgtcatggtcgatacgcccggattgcacaaaccccatgatgccctcggcgaggaactcaatacgtctgcgttgaaggcgctcgaggacgttgatgtggtcgcgatgctcgtcgatgcatcgaaaccgataggaaccggtgacgaatgggtcgccgagcacgtgcgcagcgcgaaagcgaagcgcatactcgtcattaccaagatcgatctggcaacgcccgaggaaatcgaaaaacagaagctcgccgccgagggtctggcggattgggacggtatcgtcgaggtttcggcgcagacgggtgagaacgtggaggctttcgtcgggttggcggaaagcttctttcccgaaggcccccaatggtttcccgccgatatggatactgatcaatcgcttgaggtgataatcgccgaattcatacgggagaagatattgcgggaatttcgcgaggagattccgcatgcaatcggcgtggctaccgaagagctcgaatacgtgcgggcaaaggatatgtaccgcatcttcgccattgtgtacgtggagcgcgacagtcagaaaggcatgatcatcgggaagaagggcgcggctatcaagcaggtgggaacccaagcgcgcgaagatctcgaacagctgctcgggtgcaaggtgtttttagaccttacggtgaaagtcaagaagaactggcggcgcgatctcaatcagatcaggcgtttcggatacggggaagggatatagcctttcatggacgatcgccggacgactcccgatgccgaagaagcccgtagaagggctcgggagcggcttgccgcccggcagggaaggatcgcgtcggaagagggcaggcgcactgggggcgaaaggcccgatcgcgcaagcggagtgcggcgggcttcctctcggcggcagcccgatcggatggaggcagggcgatccggcatcggtggcgtcctcgaagcggcgttcggggcggtctcgtctgcattcgcggcgcagaaccgccggctggtcgtcgttgccctgctctgcatcatcgctttggccatgctcgcggtaggggtgtcgagttgcgtgcgcggctgttcggccgaacaggttgaagacgaggagccggttcaaagcgagcagcaggaaaccggcgagggggctgtgccgacgccggtgtcgcttcccgaaggactcgatgccgacttggcctcctcgcttgaagccgctgcggcaaaaagcgaggatgtcgcctggatcgcgaaccacgccgccgattatgcggtcgatggcgatatagtccagtacaagcttctcaagcttgccgtcgaggaacctgaagccgtggcgttcgtcaagggctttcccgaatcctatcccgccgatgcggcgactccgtacgaaggcgagcttcaagcaaatgcggtgccgcgcctttatcaatgggatacgcgctggggctacaccgtgtactcgtcgacgacgttcgcgctgacgggctgctgcccgacttcgctttccatggtgtacatggggttgacgggaaagacggatctcaccccttacgatatggggctccgcgcgcaaaacggcggctacatgacggaatacaacggaaccgacgacgcgtttctcgtcaacgaggcggcgagcctcgggttggcgtgtgccgagatcccggtggactccgatgtcctgcgcagagagctggaagatgggaaagtcgtcatctgcaacgtcggtgccggcgatttcacgacaggcggccattacctcgtcatcacttcgatcaacgacgacggaacgctgaacgtcaacgatccgtattcggcggaacggtcggcgaaaacctgggatgtcgatcaggtcgtagggcagacgaaggccctgttctcgtattcgcttgtatgagaggttccttcttcggcaaggcgtggccgggacttgccggtcgcttaatcgtggcgtttttctagccgcaggccaaatgctggtttcccgtatacgcaagcgtacgcgtttcggctacaatacatccgagtaaattgaaaagggagccgatgcatgaattgtccgaaatgcagctttgaaaacataccaggggccaagttctgcagcgaatgcgggtcgccgcttaccgatagcggaaagatcgccggcttgtcggttgatcgcagtgcgggcgcagaagcgccgcgaggcgatctcgacacctccaagatccccgacatcaagataccggggataaacgccgacgaggaggatccgagcggcgatatcctcgatcagacgggtgacgacgggttcgatttcgaccctatcgacgacgaggagcccgagtacggcgattggggcccgtatgcctacgatccggacggcgatgcggagaccaaacgcatacaggatacgaggggcatcgacgaatttctcgtagaacccggatacgtgccgcccgcggccgtctggaagaccggcgatacgatggaaatgccgaaggtcgaaggcgctgcggcaccggcgaagaaggagttcaaggctcccgatgccgagaagaagcgcggcggcaaggcgaagcttgtcatcatagggctcgtcgccgttgcgatcgtttgcgcagcagcagcggccatcacctactccatggaactatggggcggaaaaacgatacccaacgtcgagggaatgcagagccaggaggcgatcgacgagctcgaatcgctcgggttctccgtgaagaccgtcgatgtgaaatccgacgataaggagggccgggttcttctgatggaccccatggccggcagccgaatggaagagggcgtcgagatcgttttgagcatagcggcagggcgctatgtgccgaacgtcgtcggcatgacgcaggatgaggcggcatcggcgcttgcagccgaggggttcgagaacgtggagattgcaaccgagaagtcgaacgaggcggaaggaaccgtgctttcggtcgatccggcagcggaatccaaggcgatctcgactcagaagataacggtgacggttgccgaagcctatacggtccccgatgttgcgggcatgtcggaatccgaggcgctccaggcgctgtccgatgcgggttacgaagcgtattcggtgtacgtgtattccgaaagccctgagggaaccgccattggaacggaacccgagagcggaagcaagctcgatgccggctcccaggttgccatccaggttgcgaaatcgcgcgcaaacgaactcgtcgcattggcgaacgagtatctcaatggagcgggtacgatcgaaatcggcggtacgacatacgagattgcatccgtcgacggctcggcctcatacaagggcgataatacgacggcaagcgcggtaagcgtacgggcgatgaccacgctcgacggcgaaacggtttacggatcgctcaagcagcgcacggtgacgatcgtctggagcgattcgaacgacatcgaaagtatttcgtaggcgcatatggcggcggggacctatagggcgcgcgtcatcgttcttcgaaaaaccaagctcggcgaaagcgatctggtgctcacgctgctttccgaagacggatcgcagataagggccgtcgccaaaggcgcgagaaagccctcgagccagttcgcctcgcgactcgaactctattcggttgcggatgtgctgtttgcaggcgggaaaagtctcgatatcataaaagaagcccgcctcgagcgggctttcggacgcattcgaagcagcatggaacacgctgcgggcgctgcggcgatggccgagttgctcgatcgcgtcacgcagctcgggcttgaaaacacgaggttgttcgcccttacggagtcggcgcttgcgcatcttgacgaagccgacgcgcccatggttttggcgatcactgcggcgcacattctcaaagcgctcgccttcgcgggcttcaagccgagccttaccacctgcgtatgctgtggcagagacgtcgatatcgccgtccgtgatacgatcgtgttcgtctcgtatgccgagggcggagcgatctgcgcggcgtgcgctccccgaaacgagacgatacgactgcgttccgagatctgtgcgtgggcgaatgcgctgctcgtttcgacctttgacgagatagccgcatacgacatcgatctacccacatcgttttcggtactccagctctgccagagctgggttcgcgaacatgtgggcgcgaacctcaaatcgctccagttcctctttacaagcggattgttcgagtgatcgatcgggcgcccatccgagtcggggggagtccccggctccctttaagcttcttgggcttttctcagtcctcgaaccagttgatcgacgcacgacgtcggcttgcgaccgcaggtgtttccctcgaacagctcggcgacttcgtcgatcgtcatgccttcgactaccttggagatcgctttgaggtttccgttgcagcccccttcgaaatcgacatgggaaacggtatcgccggaaagttcgatgtttatggctcgcgggcagacgccctgaggtatgtaggtgtacatggtgctccttgaacggctcgtctcaatcgcacctattatataagcgaatagctccacagcgcgcgacattgtccgatgacggtatcgaaactccaggctttggcgctgcgttcggggctgttggggtcgtggatcacgagattgctgttcttatcgatgtcagtgatgacgatgaagtgccccgtggtcgtgaaatcaccgggtcccatgctcgcgatgatgggccgtcctttgacgagttctcttctgatgctctgctcgtcggctccaacctcggttgcggcaaggcccaaagacgcggcgccttcggtcatgaaaagccatgcggttccatcgggaccggcgtagcctcccttcgttgcgagttcggccatggcggccggatctttgtcggtcgcgcccgtcagggcgatgtaaaccatggccatgcaggtcggaccgcatccgctttcgccgaagtggttctcggcgtatctgatgttcgaccatgcgggatcagtctggtacagaagcgggacgctgcctttttcccactgcgccatcggcgtgctctgcgccgtcgctgccacaggacttctgtatgcggcatcggcaacgggcaggttgccctggatggcctgcatcgaaaaccatcccgcgaaaccgacggctgcaacgaggatcagggctgcgatcgcagttgcaggcgatcgggtcgacgagcggcgcgatcgcccgctgtagttctgctgaaaaggggtgccggcggaagccggatgggcgcagcggcgatcttttgcgctatgggctgcgtgtgcgtttcgcggttgccgggggtgggcgtgcggggggttgcaagcgttgcgggatgcgggatgcgcggcgcgcgcataagccgaatgcggccttgcctgctcgcatccgcttcgtgcgccctgttgcccggcgtttcttcttggttgcatggcgtcctccctgcatctcggataagcggtcgattgcgggcccgaatcgagtatcgctcgtcgcatggatcgcgtcccagaagaaggagtaaccgattccttaatttttccttaaatgttgtgtatgcggcgctatcaacgaattcggacggtacaattgagccatggaaacgacttcccacatatgcgtatgcgatgacgaggcggctatcgccgatcttgtcggaaagctgctggccgacgagggataccgcccctcggtgtgctattcggccgctcaggttctcgatttgatgacgcgcgatcgcttcgacctcgtcatcctcgacatcatgatgccgggaatcgacgggtttacatgttgtcgggaaatcagaaagaaaagccaggtccccgttatctttctgactgcaaaagacgaggagatcgacaaggtggtcggcttcgagctgggggcggacgattacgttgtgaagcccttcaagccccgcgagctcatggcgcgcgtgaaggctcggttgcggcgcacctcggtcgatgcgtcgcgggtgcaggcgcaatcggtgctcgaagcgggaggcgtcaccatcgacgaggccgcctacaccgcaagcgtgctcggcgaggagcttgcgcttactccgaaggaatacgcgatcctgctgtgcttggccaagcaggcgggaaggcccgttgcatcgagcgagctcttcgaagcggtttggggcgagcctgccagcgtgcagggcaacaataccgttatggtgcatatacggcatctgcgcaagaagatagccgcaatcgattcgtcccaagaatacattgaaacggtatggggcgttggatacaagctcggatagggcggtgcacgcttatgtctagcacatatgccaacgatcagaccaaaacgctccggcgctcgattttgtggcgcaccatactcaacgcagtgctcttcacggcggtttacgctgccgccgtcttcctcgtcgagctgttcaaacccgcgctttcgaacttcgttttctataccgtgctcgatggagtgggttacacgctctacaacctgctgtcctcgctttactacctcgtcgctgcaggcgtgtacctcatcggcatgatcctcgtcatccgtgcgggcatcaaccgtgcgcttcggtatttcgatgccctcttcgaagctgtcgagggcatgctcgtcgaagagggctctccgatcgatttaccggcagagctctcgtcgaccgcccttgcgctcaatgggatacaggcggagcgagaacgcagcgaacgggccgccaaggctgccgagcagaggaaaaacgagctggtcgtgtatctggcgcacgatatcaagactcccttgacttcgataatcggatacctgacgcttctttccgaatcgcccgatatgccgatcgaaacgcgggcgcgctatgcgagcatcacgcttgagaaatcctatcggctcgaagagctcatcgaggagtttttcgagattacgcgatacaatctgcaaaccatccccgtcgagcgcagccgattcgacgtcacgctgttctgccagcaggtcatcgacgagttctacccccaggcttcgtcgcgctcgctcgagatcaagctcgaggcacccgacgagctgccgacgttcgccgatgcgaacaggctttcacgcgtgttcaacaacgtgctgaaaaacgcgctttcctacgcagacgagggaagcgttgtggaggttcatgtgggggagagcgtgatcggtacggtgaactggctcaaaatcatggttgtgaacaggggtcgcgagataacgcccgaacatcttgaccgcatattcgagaaattctaccgaggcgacgatgcgcgcacgacggcgtcgggcggggcggggcttggccttgcgatcgcgcgggagatcgcccgtgcgcacggcggggacatcacggctgcgagcgagaacggcatgacgagtttcgccatctggattccgcaggcggggttctagcccatctgaaggaagcccgttcgacggggtctgcgcccgtttgccttccgcatcgatctttcggcttggatgcccgtcgattgcgaaagcctgctatactgaatgattatgaaagagatcatcgataaaaacggttcacggcgaatcgccttgttgctggcgtgttttgtcgcactggtttcgacgatcgccgtctgcgcgctttcgtcgatgaccgtttctgccgaatcggctttcgccgaggaagacgccgcatcgcagcaggaatccgaaaacgtcgacggcgatggaaggcgtgtcatccgcatcgcgtttccccagcaaaacggtctgaccgaaacggacgacgacggcacgagatcgggctatactttcgagtacctcgagcaaatcgcccagcagacgggatggcgctacgaatacgttaccgtcgaaggcgatataaacgaacagcttgtcgcgatgctcgatatgctcgaatcaggcgaggtcgacatcatgggcgccatgagctacagcgatgctctcgctgaagtctacgatttcgcgatcaagccctacggctacgcgcatacggcgcttttcgcagcggacggcaatacggcgatcaccaacacgaatgtctacgaactcgatcatgcgacggttgccacgaacggtccttctccgacgagcacggccgagctgaagacgttctgcgcgatgaacggaatcgagctcgacatcattcaagccgactcgtccggagatgcagtcgatctcgttgtgcggggggaagccgatcttgccctcggggtcgatatcagcccgctgccgggcctccatcccgttgcaacattcacaccgaagcccttctactttgcaacgacgaaggggaacaaagagatcgtggcgagcatgaacgaggcgatagcaagcatcgacagcgcagaaccgcagctgcaaagcagcttgtacgataaatacttcggcatagacgagaccgtgtacgggttgtccgacgatatgaaatcctatatcgaacaacagggaaccaccagggtcgggtatttcatcggcgaggcgccgatccaagatgccgacgaggaaacgggcgagttggtgggggccgcgaagggcgcgctcgattacgtatcggaatatacgggcctgtcgttcgaggcggtcgccataccgaacggcatgcccgtcgacgaagccatcgaggcgctcgatctcgacatggtggtcggggtgtcccacgattacgagcttgcgcgcgagaagaacctggcgttgagcaccccgtaccttcgatcgctcaagtggcttgtcgtccgcaacggcgtcgatgcgagcgatctttcgggcaagagggtcgccgttgcggcgaaccgcgcggctgccgaaggccgaatcgaagactcgatcgtgtacgacaccgtgcaggaatgcttcgatgccgttgatcggggcgaagccgattacacgtatgccgacggctatatcgcgcccttctacatcagcggcggccagtacagaaacattacggcgttggccgaaacgggcggggtggagagcaacgtatgctttgctgttcccgcgtcttccgatacgacgcttttgaagatcctcaacaaagcaatccaggtcatgccgaccggtgcgaccaacgcgagcatctacggccaggttacgcagatgcagaaaatgactcccgagcgcttcgtgaaggatttcgcgatcgagatcatcgtggtcagcttgattctcgcggcgatcatcatcgcgctcctcgtgttgtacgcgcgcacacgctcgaaggcgttgaccgtggtgacggccgagaaggaccagcttgaaatgaaggctgagcgcgacgacctgaccgggcttctcggcgtggggacgtttcgcgatcgtgcgcgtgaaatgctcgctcgcggcgaggcgggcgcgttcatcgtcgttgatatcgacgatttcaagttggtgaacgatacgctcggccatagaaaaggcgacgacacccttgtagcccttgccgattcgctgcgccaggcgtttcgaaacgacgatctgctttgccgtctcggcggcgacgagtttgcaatctgcgtcagggggagcatcgattcggaaacgctcgaacggcgttgttcggcgctgcaggatcttgtggagaaatcgaccgggagcctgagaagcgattatagcgtgagcatcggcgcgacgcttgcgcatcgctccgatcgttatgcagatctgtacgaccgcgccgacaaggcgatgtactatgcgaaaaggaacggaaaaaacagcttccacatcgaataacgcggttgtgttctgcctgtgtgcaaccggcggcgcccaatttgcacgcttgcccgcgaaacgcaaaaccgatacactatgcaggttgccaaaaggcagcgctacttcgcccttggttcgcatgcctgcctgcttgcttacccagtgcgaagcgaacgagaactgagaaaggtgaaacatggccaacaaagacagcatttcgaaagagcgcaccgcagaactcatcaaggagttcggcaaggacgagaaggattcgggttccgctgaagtccaggtcgcaattctctccgagcgcatccgcaatctgacagagcacctcaaggagcacaagaaggatcatcacacgcgccggggtctcatgatgctcatcggtaagcgccgcagcctcctcaagtacatcaagaaccgcaacatcgaggagtaccgcacactgatcaagaagctcggcatccgcgacaacatctaagctaagcatgagcccgcatccgcgggcttttgtataggggcttcgcgaatcgtgggaggcccgatcggtcggagacgcaagggcgtctttgctcgtggcagcgggaaatctaagtacccgcacagccgaagaagccttcgtgcaatagggtgcgggggattgcagagaaagaaagaatcagcactatggaaaaaattgtcgaatcattcgagctgtacggaaagtcgtacagattcgaaaccggcgaactggcgaagcaggcaacgggtgccgtactggtcactcagggcgataccaccgttctggtaaccgccgtcgtgggcaaggagaagcccgattacgacttcttccccctgactgtcgacttcatcgagaagatgtatgcagtcggtcgcatcccgggcggctacctcaagcgcgaggcccgtccttccgacaagggaacgctcaccgcccgcatgatcgaccgccccattcgccctggcttccccgacggctacaagtacgaagtgcatgtggtagccacgacgttcgtcgtcgatagcatcaacccgcccgattgcatctgcgttgccggcgcctctgcagcgctcatggtgggcggagcgccgttcgacggtcccgctgcgtgcgtgcgcattgcgcgcgacatcgattcgggcgagttcatcgtgaaccccacgttcgaggagcaggagaattccgatctcgagcttaccatcgccggcacggccgactacatttcgatggtcgaggccggagccgatgagatctcggaagaggacatgctcgcggctatgacgttcgggcaggaggccatagcggcattctgcgagaagcaggccgcattcatcgcgaaggtcaatcccgaaccgatgagctacaacgtccacgaagccgatccgtccatctccgctcgcgtcgaacctttcctcgaccagatgtccgctgcgctcaaagatgccgacaagcatgcgcgcatggacaaggttgcagagctgaaagattccatcaaggcgaacgagttctccgaagaggagcgcgcggcctggggaagcgacatcgcggcggagctcaagaagctcgagaagcatgcgatgcgcgcaatggttatcgagaccggcgagcgcgccgacggccgcacgcccgaggagattcgtccgctgcatatcgttcccggctacctgccccgcgtccacggttccggcctgttccagcgcggtcagacccaggcgctctcgatctgcacgctcggcatgctcaacgaatggcaaaggcttgacacgatcgatcctgccgagggcaagcgctatatgcatcaatacaacttcccgccgtattccaccggcgagacgggtcgcatgggtgctccgaagcgccgcgagatcggccacggcgccctcgccgaacgcgcgctcatccccgttcttcccgatgaggatgaattcccttacgcgattcgcgtggtgtccgaggttctcgagtccaacggctcctcttcgatggcatccacctgcggttcgacgcttgcgctcatggacgccggcgttccgataaagcgcccggtttccggcatcgccatggggctcatcaaagagggcgatgacgttgtcatcctttccgacatccagggcatcgaggacttcctcggcgacatggacttcaaggtatgcggaaccgagatcggcatcacgtcgcttcagatggacaacaaggcaaaaggtctttcggtcgacatcctcgcccgcgcgctcgcgcaagcgaaagatgggcgggcgttcatcctttcggccatgctcgacgagatcgccgaaccgcgcgagcagcttcgcgatactgcgccgcgcatcgagaccatccatatcccggttgacaagatccgcgacatcatcggcaccggcggcaaggtcatccgcggcattcaggatgagaccggcgcaacgatcgaggtgcaggaagacggcaccgtgcatatcgccgccgtcgaaggccccgcaggggaggcggcgaaggccatcatcctcggcatcgtgaaagaacccgaggttggcgaggtgtacgacggcgaagtcgtgggcattaaggacttcggcgcatttgtgaagctgacgcctggcaaagacggccttctgcacatttcgcgcatggccaacggacgcgtcgccaaagtcgaagacgtgctttcgctcggcgatatcgtgaaggtcgaggtcatcgaggttggagacaacgggaagatctcgctcgaccgcgtcgataagcccgacgctcccgcatcttccgcttccgacaaccgtcccggccgcagcgatcgcaaagaacgcaccgatcgcagcaacggaggaaattccggcaaaagcgagggcggcaacaacggacgcacgccgcgcaggcgccactaaagccgcgcagccgcagttcgcgatctgttaacgggcgggtctcgcatcgaatgggatgcgagacccgttttttgcgcgggaagcatcgggcatcgacgccctttaccgcatgcatcggcatgcgcaagcggagacaaggcgaaaggcgcgtcactgaaacagcctgcgggcatcggttaccgatgcgaaacatccgacgcctcccgcccgtgctaccatagcttcgtaaaacgagagacagggagtcgtcgatgatacgggttgcaatagccggttgcgcggggcgtatgggaaaaacggttgtcgaagcggttggcgccgctgacgatatggaggtggcgtgcggcatcgatccccatgggccggacgcggcttttcccgtatatcccgatgtcgaagcggcggtggggggaaccgagttcgatgttctggtcgatttcacgcaacccgatgtcgtagcgggaaacctggccgtcgcgctgcctgcgggcatcgattgcgtcgtgggcaccacggggctttcgaacgaaacactcgagaggctcgcgcaagcggcagcggggaaggcatgtttgttctacgctccgaacttcacgaccggtgcggtgcttatgatgcagtttgccaaggccgccgcgccttatttccccgaggccgaagtgatcgagttccaccatgcgaacaagaaggacgcaccgagcggcacggcggtgcgaacggcgcagatcatcggcgaatcccgcggattcgaaagctcggcgccgggatcggaaaccgaaatcgcaggttgcgagggggcccgaggcgctctggtcgacggcgtgcccgtccattcggttcggtcgatgggctatgtggcaagtcaggaggtcgtgttcggatccatggggcaatcgctcacgatccgccacgactcgtgggatcgaacgtcctacatgcccggcgtactgctcggcattcgcagcgtcggcgagcaggagggcctcattgtaggtttggagaacttcatggcctaaggcgtacatacgtggcataattcaatgtcacggtaacagaggaaccacgaaacgcagtatcgaaggagaacaccatggcagcaaaagccgagccccggttcgggcgcatgatacccgcaatggtcacgccgttcgacgagaatcgcgagctcgatctcgataaggcgcaggctttggcaaaccgccttgtcgacggtgggagcgattctctcatcatcaacgggaccacaggcgagagccccacggtgttctacccgcagaagatcgagcttttcagggcgatcgtgtcggcggttggcgatcgcgtgcctgttttggccaacgtcggcgacaactgcacggccgatacggtcgattttgcacgagaggtcgaaagcctcggggtcgacggcatcatgctggtggttccctattacaacaagcctccccaagagggactgtaccgccacttcagaactatcgcggaagcggtcgatctgccggtcatcctgtacaacatcccggggcggtgcgtcgtcaacatggaggccgatacaacgttacggcttgcccacgatgtcgagaatatcgttgccgtgaaagaagcttcgggtaacatggagcagatcaagaggatcatcgaggagtcgcccgatgccttccaggtgtattcgggagacgacgaggcaaccttcgagatcatgaagatgggaggcgccggcgtcatctcgacgatcggcaacgttgcccccgcacgaatgaaagaaatagttgagctgactgccgctggaaactacgacggcgcgcaagcggctcataatgcgttgcaaccgctgatgaaagagctttttgtcacatcgaacccgatcctcgtgaaagaggcgctcaagctcgtcgggttccccgtcgggggcgtaaggctccccttggtggatgcaacgccggagcagtccgagcatctcgcgcaggttatgcgggaagtcggagtgctgtaagcgcaaagaaaaaggaatagtatggaacagaagaacgctcgcgattctcgcgagaatagtcaagcgcggaaagagaagaacacgcgctcgtacaagcatgtccagttggagcggaaaaggccccagctcaccaagggcgacgatgctcagagcacgccgtcggcgaagcggggcggtgcaggcgggcagagccgtgcgccccgaagcagaagccagcagggcgagagacgatcggccgacgttcccaagaaggatcccaaggcgacgctcaagatcattccgctcggcggcctcgatgccatcggcaagaacatgacggcattcgagtgcaagggcgatatgatcctcgacgatgcgggactcatgttccccgacgacgatcatccgggcatcgatctcattttgcccgattacacctacgtgctcgaaaacgccgaaaagctccgcggcatcatcatcacgcacggtcacgaggaccataccggcacgctgccgtacctgttgaaagaccttgatcggcaagtgccgatctacgcgacgaaactcacgctcgggcttattgagggcaagctcgccgaacacaagatcaaaaacgccaagctcgtcgagatcaagccgggcgaccagattaagctcggatgcttcacggcggaattcttcgcggtgaaccattcgatccccggagccgtcggcgtgttcttccagagtcctgcgggaaacgtgcttcatacaggcgacttcaagcttgatcaaactccgatcgacggcgtgcataccgatttcggcgccctctctaagttcagcaagatcggcgtcgatctcatgatgtcggattcgaccaacgcgcaaaaccccaacttcacgccttccgaggcggaggtcgggaaaaacctttcgaagatcatctcgcaggccaaagggcgcgtcatcatcgcctcgttcgcaagccatatccaccgtatgcagcagatatgcgatgcggcgattgcgaacgggcgcaaggtggtcgtgacgggcaggagcatgatccagaacaccgatatcgcgcgtcgcctcgggtacctcaaggtcagcgacaccgacatcatcgacgcctacgacctcaagggcataccggccgaacaggtggtcatcatgtgcaccgggtcgcaaggcgagcccctttcggctctgtctcgcatcgcaaacggcgagcaccgcaccatcagcatcgaagagggcgatacggtcatcatctcggcaacgccggttcccggaaacgagaaggcggtcacccgcgtcatcaattcgctcgcgaagatcggcgccgacgtttacgataagaagcgcgccatggtgcatgtttcgggacatgcgggagccgaagagctcaagctcgtgctctccatcgtgcagccccgctcgttcatgccggtgcacggcgaagcgacccatctgcgcgcccatgcgcagcttgccgaggcgacgggcgttgcgagcgaaaacatcttcatctgcgagaacggcgaaagcctcgagctcactgcaaagggagtgaagcgcggcgaaaccgtgcagagcggcatagtgttcgtcgatgggctttcggttggcgatacgtcgcagagcgtgctcgacgagcgcaacgcgctcggatcgcagggattcgccaccgtcgcagctgcggtttcgaagaagcggaaggacgtcgtgggcgatgtccgcgtcgaaatgcacggcataacgggcggagacgacgagtacctgcagcaggatgccgcccaaacggtgcgcaatgcgctcaagcgcgccctctcgaaggaaacgcagactcgggagctcgaaaaagcttgcaaaagcgcgcttctctcggttttatgggagcgcaccaagcagcgcccgatggtcatcgtgaacgtgcttgacataccgtaaaggtaagatggtaaacacacacgtgacgattcgtcgttgaacggagaaaaaagcccgcgcaagcgggcttttcgtctataatgggcgaagtttgacaatcgcagcataaacacagtacataaaggagctctgacgtggctcgccagacgaattcagcagccaagcaaaagcaatcccaggcgaagggcgcaaaagcagcctcacccaaggaaaaacaggcacagaaaagcaaaaaggcacaagcgagcagggtcgaggaggccccgcggcttttcgacgagcgcacgcagcgcgatatcgtcggcgtcgtgttcgccgttgtggcgatcgtgttgttcgtggctgccgtcatgccctccgatgccgttgtcacggcgtttctctcgaccgttttgcaccttacgctcggcgtgggcgcctacctgcttccgttcttcctgctcgtcatcggggcgagcttcctgatacggttcgaacgtcagcaggtgccggttcgcgtagcggtcgggctcgtcatgatcttcgtggcggtgcttgcgcttctatcccttttcacgccaggagccgagcgtgatgcgatgggactgttcgccgaagaagcccttgcggcacgcggcggctacatcggcgcagggatcgcgtgggcgggactcacgttgttcgggcagaccgttgccgccatcattctcggcggcatcatctcggcagggctcgtcgttatcggattctccatttcgagccttatcgagaaggtgcgctcgctgcgcgagcacgatgatttcgacgatgccgacatactcgaggcggctccgttcgagccgcgcatcaagcggcagcgggaatcggcaaaggacgatcttgcgcctgcgaacgtgtccaatgcctatacctcgaagatcgaacgccgtccgaagcgcgctacctcttcgctgaacacccaggtgctgggaggcgtcgcaccggttttcgacgagccggaatcccatgaacagcccatgacgcgcaagctcgggaagaaaagcgctgagaaggaaaaggcctctgcagaaactccgaagacacaggccgtttcgaagaccgctgcgaagagctcgacgccgctcgcaaccccgcagccgcttgacggctttacgctgcctccgatgagcctgcttgcccgctcgtcgggcaaggggtcgggtgcgagcgaagccgatttgagggaaaccgctgcgtgcctgcaggagacgcttgaagatttcaacatccttgcggaagtggtcggctgggttgcgggtcccaccgtcacgctgttcaaggtcgatctccccgccggcgtgcgcgtaagccgcgtgacggcgctcgaagacgatatcgcgcttgcgcttgctgcgccgggcgtgcgtatctttgcgccgattcccggcacgaactacgtgggcatcgaggtgcccaacagcaagcggcaaagcgttctattgggtgatgtgctcagcgatgccaccgaagggccgcttcaaatcgccatcggcaaagacgtcgaaggctcgtcgatcgtttcggatctcgccaagatgccccacttgctcatcggcggtacgaccggctcgggtaagtcggtgtccatcaacgcgatgatcatgtcgatcctcatgcgtgcaacgccctccgaagtgcgcttcatcatgatcgatcccaagcgtgtggaattcacgccctacaacggcattccccatctctacgttccggttgtgaccgaagcgaaagaggcggcgagtgcgctttcgtggggcgttgccgaaatggaaaggcgccttaagatattctcgaaggtaggcgcccgcaacatcggacaatacaacgcgaaggtacagcgcggcgaaatcggcgacgaagaggcgaaggagctgccctacatcgtcatcatcatcgacgagcttgcagaccttatgatgaacgtcggcaaggaggtcgagttttcgatctcgcgcatcgcacagctggcccgcgctgcgggcatccatctgatcgtggccacgcagaggccttcgaccaacgttgtcacgggcctcatcaaggcaaacatcacgaacagaatagcgttcaacgtagcgtcgggcatcgattcgcgcgtcgtgctcgacacgccgggggcagaaaacctcatcggcctcggcgacttgctgctctcgaagcccgagctggcgaaaccccagcgtatccagggctgctacgtttccgaggacgagatcaacgctgtggtcgacatgctcaaatcgcaaggcgagcccgaataccattccgaaatcctcaacacgaacctcatcacgctcggcgcctcggcgccggatggatcgggtggcagcgggtcgagcgacgatcccctgatttgggaagctgccgatatcgtggtttcgagcgggctcggatcgacgtcgaatatacagagacgtctcaaagttggctattctcgagccgggcgtataatggacatgcttgaagaaaagggcgttgtgggccccccgaacggcagcaagccgcgcgaggtgctcgtcgatgccatggaactcgaaacgctgaaagcgttcgaagcccaggacgaggccggcgaaccatcgtttgcggaggagtgacgacgtggaccaggtaagttttggaacggttttgcaggacgcccgcatgcgcaaaggctacgacttggccactgcggcgcgccggttgcggattcgccccgatatcctgcaggccatagaggcggcggatttctcgcggatgcccccgagaggctatgcccgcaacatggtaaacgcttatgcgcgctatctcggcctcaatccgaccgaggtcacgcggatgtatctcgacgaggcgtacgcctaccaggtgggcagagcccgctccgatgcgcgccaaacgggtttcgatatgtcggccgctccccctaacaggcgcggcagcaggcgcgattacgacgagcagggagaatcgacggcacttggacgcaagctctacgtcgatgatccccatcggaaccggcgacgcaacgaaaccgcgcgatccgagcgatacggcgaggaacggacgcatcgatcgaacagaagcgcgcttcccaatacgcagtacacgaatttctattcggggccgaaggcttcgccgctttcaagttcgaagctgccgttcatcattgcgggagcggtcatcctcatcttgctgatcatcgtgctcgtgctggtgttcgggcagggcggatcgagcaacgaagacgtcccgaaggtgccggtgaccggattgagcgatccggaggattcgggatcgacgaacgatggcggcgattcgggggacacccagcagaacaccccggcgaaagtggctccggctagcgctgtgttcaaatacgaggtggggaacggatctgcctatatcgaggttatcgtcgacgacgtgaccgtcgaagcggatgaggtaagcggccccgcgaacaaggaatacgacgtcacgggcaagctgaggttcaaaacaacgaatcccgatgccgtcaaggtgtaccaagatggcgaggagatcgagttgacatcgccgtacaacgacggcgtatacgaggtaaccgtcgacttcgcacaggtgcttaagaagtggcaggaggataacccgtcagcgggaacggctgggcaggccggggatgcggatacggggggaaccgatacgggcgatagcggttcgccgagcggaacggcaaacgaatagcgaacctcgtgcgagcggtagaaacatgccgctcgtcgcaaatgcgggatgtttttcgaggatatgggcgagcgggggcaaacgcatccccgctcgcctataataaggccatacaacaggggctcggcttgtgccgagccttatcgcgatacgcgaaggcgcgcgccggacagcgtcgggcgcggcagggaatcgaggaggaacgacatggcaaaagaatcgagcttcgacgtggtatccaccgttgacatgcaggaagtcgacaacgcgttcgggcaggcgaaaaaggagctgacgcagcgctacgatctgaaggattcgggagccgatatctcgcttgacaagcagaacaagacgattacagtagccgcgccgagcgatttcgtcgcaaagcaggtcatcgacgtcatcgggtcgaaactcgtcaagcgcggcatagatttgaccgctgtgaagtggggtgccgtacagtctgccgccggacagagcgtgcgacagacggcaaccatcgtcgagggaatcgaccgcgacaccgcctcgacgatcaacaaggatatcaaggcggagaagttcaaggtcaaggttcagatcgaaggcgacaaacttcgggtgagcagcgcttcgcgcgatgccctgcaagaggtcatcgcgtttttgaaggaaaaggactacggacagccgctccagtacgtcaactaccgataacgggtcgggctcatgattcgagattcaggatcgccgcgcgtctgtttcgtaacgctcggttgcgcgaagaacgaagtggacagcgatcgaatggcgcagcgcgccgccgaggcgggttttctcatcgtcgacgagccgcgcgaagccgaagcgatcgtggtcaacacctgttcgttcatcgaggcggctaccgaagagagccttgagatgatcttcgacctcgccgagatcgagttttccgacggaaagcgcccgcccctcgtcgtggcgggttgcatgcccgcacgctatggcgacgagctcgaatcggagctgcccgaagcggcggctttcgtgccgtgcagcaaggaggatgacatcgccgaacttcttgccgaggtgctcggactcgaattgcctctcgcggaacttgccgccgatgcggcagacgagcgcagcggcgccgtatcggcatatgtgaagatatccgacggatgcgatcgcttctgctcgtattgcacgatcccgttcatacggggccgctaccgcagttttccctacgatcagatcgagcgggaaacgaagcgcctcgtcgactcgggtgcgagggaaatcgttctcatcgcgcaggatacgggtcgatgggggtccgatttcgacgagccttcgagtctatcgtggctgcttgccagcctggccgagcgcttcgccgacacatggttcagggtcatgtacgttcagcccgaaggggtgaccgacgagctgatcgatacgatcgccgcgcatgacaatatttgcagctacctcgatgtaccgcttcagcacgtgaagcatgatatcctgcgggcgatgaacagaacgggatcgcgcgaggagttcgaagaactcgtgtcgcgcattcgacgtcgcatccccgccgtaacgctgagaacgactctgatcgcagggtttcccggcgaaaccgaagacgatttcgaggacctgtgcgatttcgtcgaaggagccgacctcgattacgttggcgtgttcgcctattcgcgtgaagagggaacaagggcggccgctctggaaaaccagatcgacgacgaggtgaaactcgagcgggcgcagaccttgcgcgatatagccgatacggtctgcacggcgcgcgttgccgagaggatcggcaagacggcatcggttctcgtgctcggccgcgaagaggatggacagctttacggccgcgccgcatgccaggcgcccgatgtcgacggcgtcgtgtatctgagcgaaggagagcccggccagttcgtcacggtgacgatcgcggatacgcttttgtatgaaatggaggcggaatagcccatggcaacgccagctcccacccacgagaagctctggactccggcgaatatcgtaacgcttctgcgcatttgcggcgttcctttgttcgtgatagcgatcatcagcccttggcccgcatggattcccgaatggagcgatgcggaaatttggaaatcgtggattgcggcggggatattcatcctgcttgcggccaccgacgggctcgacggctaccttgcgcgaagcaggggagaagtgacgaacctcggaaagttcatggatccccttgccgataaaatactcgttgcagcagcgcttctcgcgctgatcgagctcggcgtccttccctcatgggtcgctcttgtcattttgtgccgcgagttcatcgtatcgggcattcgcatggttgcggcgagccaaggcgtcgtgattgcggcaagttggtacgggaaggcgaagacggtcacccagatcatcgccatcgtgcttttcatcataaaggattcgacgcctgttacgacgttttccgaggtgttcagcaaccatctgtacctcgtctcctgggcggtcatgttcgtcgcccttgtgctaacgatcgtatcgatgctcgactacttcgtgaaagcgcgcgagatactcggtttcacgaaggtggctcgaaaggcgcgaggggaaggcgagcggggcggttcggaatcctgcgtgcaaaacgcttccgatccgggcgatccgactgaagaagagcttgcctcgatagaacccgacgcgcttcgggcccttgcatcggaagtgctcgaagcggcgaagcgggcgggtgtgaccctcggcacggcggaaagctgcacgggcggtctcatcgctgctacgctgacggcgatacccggcagctccgagagcgtagcaggcggcattgtgagttactcgaacgatgtcaagcgggcggagcttgacgttaagaaggagacgcttggacttgcgggcgcggtcagttctcagacggccgagcagatggcgttcggcgcgcgaaagcgcctgggtgtcgacattgccgtatcggttacgggaatcgccggcccgggaggcgcggttgagggaaagcccgtcgggaccgtatggatcggccttgccgatcctgcgataacggtttccaagctctgccggtttcccggcaaccgcgaacaggtcaggctgcttgcggtcaagaccgcactcgagctcgtcctcgatgcgattgcggggcgcgaagaaccgcgtcccttataggcggtgcgcacgtccggtttttgccggattcggttccgctgcgtgcaagataccgtgtttgatcacgttggataacgcgcgcactcgaatcgctatcatgcaaggtcttcatgccataatcggttttacggtgcgatttaaaacattcgcttgacgaacaaacatctgttcgtataatagaacagtccgaatgcaacacagacgcgctcagcgaggagaaggaaatgaaccaggacaaggccaaaatgctcaaactgacgaccgatcagatcgaggggaagttcggtcagggctccatcatgaagttgggcgaagacggcaagcatctttcgatcggcgtcattcccacaggcgcccttccgcttgatgctgcgcttgggatcggcggcgtgccccgcgggcgcatcgtggaagtgtacggccccgaggcgtccggtaaaaccaccctcgcactgcagatcctcgctgaagcccaagcgctcggcggcgttgtcgcgttcatcgatgcggaacacgcgctcgatccggtatatgcagcccgtctcggcgtcgatatcgacgaggtgctcatctcgcagcccgacaccggggaacagggtttggaaatctgcgatatgctcgtgcgcagcggtgccatcgattgcatcgtcgtagactcggtggcggctcttgtgccccgcgccgaaatagagggcgagatcggcgatacatcggtcggcttgcaggcgcggctcatgtcccaagcgctcagaaagcttgcgggttccctttcgaaatcgaataccacctgcatattcattaaccagctgcgcgagaagatcggcgttatgttcggcaaccccgaaactacgacgggcgggcgtgcgctcaagttcttctcaagcgtcagaatcgacatccgtcgaatcgattccattaaaaaagacggcgagatcgtgggcaaccgcgtccgcgccaaggtggtcaagaacaaggttgcccccccgtttcgccaggctgagttcgatctcatgtacggcgaaggcatctcgcgcgaaggctgtatcgtcgacatgggcgtcgaggcaggcgtcgtaaagaaaagcggcgcgtggtatacctacggcgaagaacgtctgggccagggtcgcgaggcggcgaagcagacgatgagggagaatcccgatctgcgcgacgagatcgaggtgaaggtgcgcgagttcttcgagattcccgtgatcgcctcttcggaggagtcggcgatcgaggcagccccgaagccgggcaagaagtagcggcatcctcatgccttacatcgacgagcggttcatcgaagatctgagaagaaaactcggcgacgaagagccatcttcccaagaatcggttgtcgcctccatgaggcctgctgcaccttcgcgcgccgcttcggcgcgcgaagcgctcggtgacgaggcgttcgaagcgtacaaaaagattcagagactcgcaagcgtcagcgaacggtccaccaaggccttgcgagagcggcttgccaaagacgggtatgcgtccgaagccgtcgacgaggcgatcgagcgcgccgtctcgtacggcatcgtcgacgacaggcgctatgcagaggcgtacgttcgtaccaagctgagagcgggtaagggccggcgaggcatcgaatcggatctgcgcgacctcggaatcgatcctgaggagatcggcgagtggtgcgaatcgggcgacgacgaggtttcccgtgctctcgaggtcctcgaaaagcgcccgccgactgccaagaacaaacgagatgcggcgtatcggaggctcatttcgaaaggatacagctcttctgctgctcagagcgccgcccgcatgtggagcgaatcgttataatttccaaaaagactttatcaaaatcgcagaaacctttatcatggtatgcagcttgagagattgcgtacccgatagggtgctgactatagagacaacccaatatctgtactctaccgtgcgcgttcgctcatgccaggtgttttgcccggcattttttttgtgccgaaaactgaaaaatgactttatgaccagtacaaacagattgaaagggggagcgaatgcccgaagtgctatggcttgtaatcggagctgtcgtcggtatcgctctcggctttgttatcacgcgtttcgtcgtcaatgcttcgacgaaacgtgctgcacaagaggctgagagcctcgttgcggatgcgaagaaacaagccgaaacgctccgaagagaagcgatcgtcgaagcaaaagacgaagtattgaaaatgaagcaggatgctcaagcggaaaacaaggaacgcttacgcgaagtgcgtacggctgaaaaccgcctgtcccaacgcgaggagtcgctcgatcgccgtgtcgagtcgctcgatacgcgcgagcatcaaatctcttccatgcagggtcagctcgaacgcagggagcgcgatctgaaagaggccgccgaggagatcaaccgtcgtctcgaacgcgtggcgggcatgtctcccgatgaggccaaggcagagctgcttgacacgcttaaggaagaggtcacgcatgaatctgccgccatcatacgcgatgccgaagctcgcacgagagccgaggccgataagaagtcgcgcgagatactgagccttgccatccagcgtgtggccgcagatcattctgccgaaaacacggtatctgccatccatattccgtcggacgatctgaagggccgcatcatcgggcgcgagggccgcaacatacgttccttcgagcagttgaccggaacgaacctcatcatcgacgacactccagagtgcgtaaccatctcgtgcttcgatcccgttcgtcgcgagatcggccgcgtgacgatggagaacctcatcgccgatgggcgcatccatcccgctagaatcgaagagatgttcggcaaagccgaggagtacgtgaaccaacgcgtgcaggaagcaggggagcaggcgacgttcgataccggcatccacgacttgcatcccgagctcgtccgcacgctcggaaggctcaggtatcgcacctcttacggtcaaaacgttctcaaccattcgcttgaggtcgcttatctgagcggagtcatggcagccgagctcggcctcgatcctattcctgccaagcgggccggtctgctgcacgatcttggaaaagccgtcgatcatgaggtcgaaggcagccatgcggtgatcggcgccgatctggcgcgtcggttcggcgagaagcccgaaatcgtccatgccatcgaggctcatcacaacgatgtcgagccgaacagcgtgctcgatgtgctcgtgcaggccgcagacgccgtatcagccgctcgtccgggagctcgtaaggaaacgctcgattcctacatcaaacgccttgagaagctcgaggagatcgcaaacgcccataagggcgtcgagcgcacctatgccatccaggcgggtcgcgaggttcgcgttatggtgacgcccgaagtcgtcgacgaggctgccacaacggtgcttgcccacgatatcgcccatcagatcgaaagcgaaatgcagtatcccgggcaggtcaaagttgtcgtgatccgcgaaagccgcgcctcagcagtagcaaaatagcatgaccgaccaatcgttgacatcgttcatcgaggaagtctgcggcgacagccatctccgagtcgatgacgatctcggggatggcttcgttcgtttacggattgccgaggcggagcgaaggcaagcccgccatgacatccgatcaactgaagatatcgtcatcgaaatgctgcgaaacgcacgcgatgcgggcgcccgaagcattttcgtctcgctttcgcgcgagggttctgcccgtaggatatgcatgatcgacgatggagcgggcataccggaatcgatgcaggatgctatattcgaaccgcgggtaacatcgaaactcgacaccgtgcacatggacaagtggggcgttcacggtaggggcatggcgcttttctccattgccgagaatgccgaaatagcgcgcgtggcagtttcggctcccgaaaagggcgctgccctgtttgttgagacgaacctcgatcgactgcccgagaaaaccgatcagtcgagcatgcccgtattctcgcataccgacgagggagagattcgcgtcagaggcccccgcaatataaaccgcatggtgggcgagttcgccttcgagcatagggagaccgtatcggtgtacagcggcgcgcccgttgaaatcgccgcaacgctgtacgaatacggaaatgcgacggtttcggcgagcaccagggcattcgcatccgatccagccgatctccccgttgtgaagcgtctgtgcctttctgccgatccggcggaattcgccgcgatggcccaagggatcgggcttgatatatccgaaaggtcggcgcgaaggatcatggacggcggcattgcggttcttgatccggtatcggaaacgcttgccttcgaggaacgttcagccgcaaagaggcgaaaggcggggaaaaaggctcttgccgccgatgcgcgaggattgaagatagatcgctccgatatcgatgcgttttccgacgggatgcgcgacgcttttgcggagctcgcgcagcggtactacctcgaacccgacgtgcggcctgaaatccacgtttcccgtgatggcatacacgtgaactttcccatatcaaagctgctttaagttgcgcggccattcattaatggctacaataaaccacacgtttgaaaagcacatatggacaattcgacagcatattaatccaacgactacatgcacgtgatacggactacaacgaccaaaggatatgcgcgtgtcaaactcaaccgaacaccgacccgaaacggggtgcctcaaagtatcgtcgaagtcttctccggcttcggttgcgggggccatcgccggcatgataaaggatggcgtgagtgtggaaatccaatcggttggagctggcgccgttaaccaagccgtcaaggctatcgccatatcccgagggttcctttccccgataggcatcgagatctattgcgttcccgcatttgccgatatcgttatcgacggtgagtaccgtaccgcgattcgattcaccgtcgaaccgcgttatacgaggggcgttcagagggagtcgggctcttcgggggaattcggcatcgacgaataaccgcccattttcaaggacataggcccatgcatcatacgttttcccatacgacgttctgtatccgtacgttcggatgccagatgaacaagcacgattccgagcgcatagcgggcatgctcgaggggctcggcgccctgcaggtcgacacctacgacgaagccgacatggtcgtgttcatgacctgttgcgtaagggaggctgccgatgttcgcttgttggggcaggttgcctcgctcaaaaaccttccattgccgaaatcgtcgaagctcgatcatcggatcatcgcggttggcggatgcatcggccaacgcgacggcgagaagctcgtgcgcgagcttccccatctcgatgtggtgttcggcacccataacctcgcttcgctccccagactcatcgaaagcgcgatcgaagccgggggtcatcatgtggaagtgcttgattcggctgagacgtttcccaccgatctgccaagcgtccgcgagcacagttgggctgcctggcttcccatcacgatcgggtgcaacaacttctgttcgtactgcatcgtgccctatgtgcgaggacgggagaaatcacgtcccttggaagatgtcatcgcagacgcgcggacgtatgtcgcggcgggcgtgaaagagatcacgctgcttggacaaaacgtcaactcctacggccgcgatctgtacggcgaaccgcggttcgccgatctgctcgatgaggttgacgcgacggggatcgctcggcttcggttcgcaacaagccatccgaaggacctgactgacggcgtcatcgagcgcttcgggacgctcgggtcgctcatgcctgcgctccatttgcctgtccaatcgggttccgatcgtatactcgaggcgatgaacagacgctatacgagggatcattaccttggcttgatcgagaagcttcgcgaagcctgtcccggcatcgctctttcaagtgatatcatcgtcgggtttcccggcgagaccgaaaaggatttcgaggcgacgtacagtctcgtcgaggaggttggttacaaccaggtcttcacgttcatctattcgaagcgcgaaggaacgccagcggccagcatggtcgacgatacgccgcacgaggtgattcaggagcgcttcgaccgattggtcgatctcgttcaggaaaaggcatggcagagcaatcaggttgatgcgggcaagacgatcgaggtgctcgtagagggcgcatcgaaacgcgatcgatcggtgctttctgggaagagtcccaaaaatcaaaccgtccacgcgcgcgtaccggaaggatcctccgtcgacgagcttgccggcacgttcgtttccgtcaaggtggaagaagcacgcacgtggtacttgtcgggaagcgtcatcgaagacgaagatgccgggcggatgctgaaaagcgatgccgaatagcgattcgacagcggacatcgccaggccggtcatctgcatcgtcggccccaccgcttcgggtaaaagcgaccttgcccagttggttgccgcggccatcgggggcgaggtggtaagcgccgattcgatgcaagtgtacaaggggatggatatcggaacggggaaggtcccccccgaagatcgcatagtcgctcatcatggcctggatctggtggatccgggcgagccgtattcggcggcgcttttccaagattatgcacgcagctgcttctccgatattgcgatgcgcggcaaacggtccgttcttgcgggcggcaccggcctctacattcgagctgccatcgacgattacgactttcctaaaggggagcaggtcgaaaaccctgtgcgggaacgctacatgcgttttgcggacgagcagggggggcaggcgctgtgggaggagctcaatcgcgtcgatcctgcaagcgcgcagcttatccatccccacaacgtccgaagggttgtgcgtgccttcgagatgctctcggaaggcactaactacgccgcgcagcatgcgcgcctgcaatcgatgcctcaagcaattgatgccatcgtctatgggcttgaggtgacgccgggggtcttggcccagcgcatagagagccgtgtcgatgcaatgatcgagcagggtttggttgcggaagtaaaatccttgttacagcgggggttcagagagggtgtaacggcgcctcaagcgataggatacaaagagatcgtcgccgcccttgaaggcgaaggaaccctcgatgacgcagtggtgcgtataaaaaccgcaacgagacgctacgccaagcggcagcgaacatggttcaggaaagacaagcgcatcgtatggatcgatgccgacgagggggatgcggggcggctggccgagcgcgtactgttcgatttgcatgatcggggtgcgcaagaacgttagaaaggctcaaagcgtggatctcgattttataaagctgcatggagcgggaaacgatttcgttttcattgaagacttttcatgcgatatcgaattgagacccgatcaggttgcctggctctgcgacaggcatttcggcatcggggccgacgggatcatacttgtcagaccccctgaaaatccatcgtgcgcggcgtatatgcattacatcaattccgatggcagcttggccgaaatgtgcggcaacggcgtgcggtgtttcgcgaaattccttgtcgatcgcggttacgtttccgctgaatcgggtcagctcgtggctgagacgcgcgccggcgaacggcggatctcgttcgagacggatgatttcgggaagcttacccaggcgacggtcgacatgggcatccccgaattttcccccagcgcaatccccaccttgctcgaagccaacgcggaaaccgaaagcggcgcgtcctacgtgcgcgaggctccccttgaatcgccctggggctggttctctttcacttgcgtatccatgggcaacccacatgccgtttgcttcctggacgacatggacggtcttccggacgaactgttctccgattctcgcgataagagtctggagacgttcgatatcgaacgtgcaggagcgtttttcgaggcgagccccgtgttccccgaacgggcgaacatcgagttcgctgtggtgggaccgcatgcgctaaccatgcgcgtgttcgaacggggatgcggcgaaacgcttgcctgcggtacgggagcttgtgcaacgcatgttgcggcggcgcttacgggccgagccggcagatcgaacgaacttgtgctcagaggcgggacgctttcgatcgaatggtgcgcggatggacacgttctgatgacgggtccggcgagggaaagcttttcgggaacaatacatttgcccgcgtagcggatgagaggatttaaaatgaaaacggcagaatgtttgaatcgcatggccccttacctgttcgcgcagatagacaagaagcgcgatgcccttagggaacaaggggttgacgtgatctcgcttgggataggcgatccagatcgtccgacgcccgaccacataatcgaggctatggagaaagccatccgcaatcccctaaaccatcagtatcccgactatgcgggctctgtagcgtatcgacaggcgtgcgccacgtggatgcatcgccgcttcggcgtctcggtcgatcccgaaaccgaagtgctggcgcttatcggcagcaaggagggcatcgctcacctccacacggctttcgtcgatcccggcgactatgtgcttgcgccgtcgatcggatatccggtctattcgggcggagcaacgcttcagggcggtcacacgtattacatgcccatgagggaggaaaacgggttcctcgctgatttcgatcgtgtgccggaagaagttctttcgaaggcgaagatcatgttcatcggatatcccaacaatcccactggtgccgttgcaaccgaggaatacttcgataaggcgattcgcttttgcttggaaaacgacatactcttggctcatgacaacgcgtattccgaaatctgcttcgatggatacagcgctccatcgatcctggagcgcccgcgggcaaaggagtgctgtatcgagtttttcagcctttcgaaggcatacaacatgactgggtggcgcatcgcctttgcaacgggcaatgccgagtcgatcgctgctttgggaacggtgaagaacaacctcgattcgggacagttcaccgcaatccaagaagcggctatcgccgcactgctcggctctcagcagtgcgtagccgacatgtgcgcgctttaccaacgtcgcagggatgcggttgtcgaggcgctcagggcgatcggcatgacatgtgaagacacaaaggcgacgatatatgtttgggctcgggttcccgaaggttactcgtcggagtcgttcgcaaccaagctgctcgagcaggcgcacgtgatcgtgacgcccggaaacgggtacggccccgacggcgagggctatatccgcatctcgctcacaacgtccgatgacaggcttctcgaggcggtcaggcggatcaaggagatagcgtagccgccttcgtcggcgacggaatgaaaacaagttgcctgcctgttgtaattgggaggatccccgtggtagtatctgagttcgtgaaatcgattcagaagggacatggcatgggagtcgcctcgataaggttgcggtagcgcatctcgtttccacctgtattccaaccttatgaaaggctttgtaaccatgtcccataccaaacattttgaaattgaagaagtgcgcgagcgtgccgttctcgtcggaatcgacagaggcgatgctgcttggccggtctccgagagccttgccgagctcgagcggcttgccaatacagccggtgctgatgtggtagccaccgcatctcaaaaactcgatgcgccgaacgcccgtacgttcatcgggtcgggaaaagccgaggaagtggccgagctgtgccgctccttcgcggccgacgtcgtcatattcgatgacgaactgacgccttcgcagcaaacgaacctcgagaaaatagttccgagggatgtgaaggtgatagaccgaacggcacttatcctcgatatcttcgccttgcatgcagcaaccaaagaaggccgattgcaggttcgtctggcccagaaccaatacctgcttccccgattgcggggcatgtgggcccatcttgcgtccaaccgcatgggcggcggcgtgggatcaaggttcggcgagggcgaaagccagctcgaagtcgaccggaggatggtgcgaaagcgcatcacctcgatcaagcgagagctcaaacagctttcggaggtgcgggcgctgcagcgcgaaagcagatacaaaagcggcatgttcaaggtatcgcttgcaggctacaccaacgctggtaaatcgagtttgctcaacgcgctcaccgatgcgggcgttctcagctatgacaagctgtttgccacgcttgactcgaccacgaggaagttcgttttgcccgagggacgcgagatcaccctgacagacaccgtcgggttcatccaaaagcttccccataatcttgtcgaagcattcaaatcgacgctcgacgagatctcgggagccgatctgatactgcatgttatcgacgcatcgtcaccggagcgtgaggctcagatgcgttcggtcgaagaggtgctcggccagataggggcacaggatatcaagcgcgtcgaagtattcaataaagtcgacctgctcgatgaaggggagttgtgcgcccttgcgaatcgtcatcacgatgcgatcgccgtatcggcccttacccaggtcgggatcgacgatttggttcgcaggatcgccgtggtcgcatcggcccatgatcggctggtaagcgtacttgtcccctatgatcggggcgatcttgtgtcgattgcccatgagcgcgcgttgatcgtgcgagaggagcatggggagagcggtacgcgcatcgatatgcagataggaccggcttacgccccgcttttcgatacgtttttaatcgaagaggacaaaagcaaagcttcgtaaccgaaagcggcgtgaaaagacacgaccccgaatcccttgcgggatcggggtcggtgcattcctgcaataccgtaagtgcagtacctaaaggcgcctgaaaacggcaacaacttttccagcgatggagcaatcggtcgtaatgatgggatccattgacgaattctcgggctgcaggcgaatatggtccgactccttgtagaagcgcttaaccgtcgccccgtcgtccatgatggccaccacgatgtcgccgttattggccgtgggctgttctttgacgacaacgtaatcaccgctgttgatgcccgcttcgatcatggaatcgccgcggacggagagcaggaacgccgctgcgtcgccgacgatttcagtgggaagggtgatggtatcggtgatgttctcttccgcaagaatgggggagccggctgcgacatcgccgacaaggggaaggctcaccaagtttccgaacgcaggctggacgatatcgtcgaagccggaacccgcaggatcgtcgagctgataagtgagggcgattgagcgcgacttcaggggatcgcgtttgatgaggcccttgtcttcaagcgccttgagatggacatggaccgtcgaaggggaggagagacccaggctttgacacacttcacgcacggtggggccgtatcccttctcgcgaatgcaatcctcgatgcaatcgagaaccgcctgctggcgctttgtgactttttctgccatagggcttcctttcaaaacttcgaacaaatgtttgaaaaatatcttgacatgaacttttgttcgccatatagtatacacgaacaaaggttctaggcaagaccagggaggaacatttatgaagaatttcgaagcacactacagcgtggtcggaacagccgccctcaaggttgacgcctctgaacagcagattcaagcgcccattatcgaatttccgttgtcgcatgctcgctcaaacggccagcatgcaacgcaggatcgtcgcatgaagatggtcgatctggcgctcatgcgcgaattgagaacgggaagcgtccaaggaaaaggcttcggccgcatcgctccttggcagtcggtgtctgccggcatcattcttgccgcgagcgctttcgccactattttcatcggcctgtaatcgactcatccgtcttccgcggaagctgcgttccgcaggaagctgcgtacgcgccccggtcatccggggcgcatttcttttcaggtggcttttgttgtcgcctgattgtgattcgcgtgaggctgctggatttacgatcgaaattgctccatgacggatgcatgcttcaaatctcgttggtgctatggtacacttccatcattcaatcgccgctggcgttgttcccgttgtcaaggagaaggacatgcgcatataacgattgccttcgggcacccaagcaagagacagtatcctattgtcgcaagcgggtgtgcaatcgttgtcgctggttctgttttccgaattaccctcgcatcgcactcgcattgcgccttgtttcaatggaggccgctatgttcattacgctgcacgatattacctacacatacgaagatgcgccgaattccgctttggaaaacctgtcggtcacgttcgccgatggttggacgggaatcgtcggcagcaatggtgctggcaaaagcaccttgctcaagttgctctgtgggatctgtaagccagattcgggctcgatcagaccggctgtttcgggagtctactgcgctcaggctaccgaagacgctccagtgaatctgctcgattttgcatccgattactcggcagatgctgttcgcctcagaacgatgctcgaattggaagacgattggctctggcgatacgatacgctctcgcacggcgagcgtaagcgcatacagatcgcctgcgcactttcacttaacccagcggttgtttcgcttgacgagccgacaaatcacctcgatcggcaaactcgcgcggttttgctggatgctctcaaagaataccgggggatcgggcttctggtttctcacgacaggctcttcctcgacgagctggtttcccattgccttttcctggaatcagggaagggaacaatgatccccggtgcgtacaccagcgcgaaagagcagcttgatctgcgcgaaaagacttcgcgaaccgagagaaaaaacgctcgcgaccagctcgctcgtgcaaaaaccgaagccgcgcgcaggaaaaacgtggcaggccaaagcagtgcgcgacgatcgggaagcaagctcgacaaacatgatagcgacggtcgtgaaaaactccgccttgccgtgtattcaggccaagatggaaaggcggggctcttgtctgcccaaatggacaagaagatcgagtttgctcaggaaagacttgacggagcccgcaccaagaagatttacgacaagcccctcgatatccacgcggagccatcgaagcgccgatacgtcgcacatgtgcagggcggcgccgtgcagatgggagagacccggcgtttgctctatcccgacatcttcgtaggcccgaccgatcgcattgctcttcgcgggcgaaatggagccggtaaaagcacgtttttgaaaatgctgcttgcggggtctttcgatctcggcgatcgtcttgtctatattccgcaggaggtgacgcctgaagaggggagagaatttctcgaaaagctcaagggcggctcgtcatcgcatcttgggggtgtgctttcgatagttgcacgtctcaactctcctcccgagcgcatcttgtccggagaagagttgagtcctggagagctgaggaaggctatgcttgcggtaggactgcttgaaagcccgcagcttatcgtcatggacgaaccgaccaaccatctcgaccttccttcgatagaggcgctgcaaaacgtgctggcgcagtgtgcgtgcgctcttgttttggtatcgcatgacgaagcattcctttcagctctgacggatatatcctggaacttcgaggagggagggatagcggcaggaggttcgtgcagaggcgatacggttctcgtcgtatcgtagcaactggtttttggtgatttgtcaaaagaaagcaaagcgcattgtgacacaatatgtagtatggtaaagtaaccgaaacaccaacaaaggagtatgatgcgctgtccttcatgtggttatgccgaatcaaaagtcgtggactcgcgcccctcggaagatggtgcttcgatacggcgaagaagggaatgccttgattgcggtcgccgttttaccacttacgagcgtttaggcgacaacccccttgtaatcgtgaagtcagacggatcgtccgaggcgtataaccgtgagaagcttttcaggggcgttctgattgcatgtgcgaaacgtcccatatcatctgagcaggtaacgagcctgatcgatgatatcgaagccgagcttcgcaacgatatgaaaaatgaaatcaaatcgaaggatcttgggaacatggtgctggctcgtcttcgcaagctcgatgatgttgcctacgtgcgctttgcaagcgtgtataaggattttcagaacatcgaggagttcgcgactgctctcgagggtttggattaacctgtggctgaaatagaagtaccgattcgccttatcgattccggactcgaaatgcccgcctacgctcatccgggagatgcggggcttgatctgcgttcttcgaccgacatgtccttggacccgttcgagcgggcgctcgtgccgaccggtatcgccgtggccattcccgaaggatacgcgggattcgttgtacctcgcagcggcttggcgataaagcaagggctgtcgatcgtcaatgcccctggtttgatcgacagttgctacagaggcgaaattaaagtaatcgcgataaatcttgaccctgctgcaaagattgaaataaaaagaggcgatcgtgttgcgcagttggtgatcatggctacacctgttgtatcgcttgcggcttgcgaccagcttgaagaatcggagcgtggtgcgggcggctttggaagcagcggttcggcatagggctcgcggttggcccatatgatgcgggataagcgggcaaacgcagtttaactgcagaagacccccgctttctcgataaaggtagtttacaaaccacatacgcagctgctaccgaaggaggccccgaaaggggcctcctaattttcacgatacggctatctcaaggttgcccttagagtaactctaaggtaatatatacagcattagagttactctaatgctgagcaaacgaagcaagttcaacagagtcagggttagagttactctaatgaaaaaggaaatgaatcgagcattgccctcgatttccaaaggcgcatgcgaccgtcacggaaatgctgcgctattcgaaaggatcgaccatgagcgaaacgccggcgcgaaaaacctccttgggtgaaacttcgcccgagtatccgatcagcgaggtttctgaaatgaccgggatctctgcattcacgattcgatattacgataagtgcggattttttcccgaactgcgtcgcgataaaaacaaggttcgctggttttcgaatcgcgacatcgatgcgttacatcttgttgatgctttgaggaaaagcggcttgtccatcgaaggcatacagtattatgtcagactaagcttgaagggcgattcgagtcgcgctgaacgcatggcgatacttgaagcgcgtgaaacagtgctcgagtaccaaagagaagagcttgaagagagcttgaagaccctccgcaatgagtttggatgcctaaaaaacaaaaatgcgaattcttaagctttctaaggcgttaaaagattgaaaaacgatgacctaggagtcgttggaagtcaaaacggggccttagaacggctctcagagctttgtttgtaaaatgcctggtcaaaggcccgtattttgcgtttgaaaggaaaacagatggccgacgagaacaatctgccaccgcataccccaaatcagcagcaatttaactacgatgatgcccgagagcttcggtcggcgcagaatctcgtcattgcggccagcataacgggtccggtatcgatgatcatcggcggggtgttccttggcgtgatcggacttgtgtgcggaatcctcgcattccgtaaaatccgaaaccttatgcgaaacaacggcccgatggccttgatggcgaaacgcctgcagactgcgtgcatcgtagctttggtggtaactgcaatagcgcttgtattgaatattatctacgtggtatcggtttatccgttgatgatcgaagctcttgagaccggtgattactccaagttgtttccagagggaacggcgccatcgactggcggttcgaacagcggaaactcaacatggggataaaactgtgtcaagacgcctttttccgtggttctcctttgtaaacacgttttattgataatgcatcttatgtaaagctggaatacctgtaacggctgactgggttgcgggtcgtttgcattcacgttagagagcatttgtgcagatcagaggttcgctctcttccacttcttcaattccagctcatatcttagaatcactatcttcgactctttcaaaacgtttcgtcagatatcgagttatggagaagccgcctgtttcagagaacaccaggtcagacctaccgtcatggcgttgcaagactggaagatagtttttgcggcaagcatgccgccttattctcttttccgggcgacgcctacaacttcacgatggcgtgcggcaccaggctcggcgtcaggttcacctccttcgggtcgattctctcgactccataagcacgcaaaagacccttcgggaacagcgccatagccaggtccatcgggctcgcccaccccatcgacccaaccatgtagctgttcacgtggctcatgcaggccgccatgtcgcggccggtgagcctgtcgaagtcggtcttgcccttgggcaggatgcgcttgagctcggcatggcgtcgctcggccttgggcttctgctgggactgctgggggtccgtgtagtacagcctcagtcgccgcttgccgttcttgccgtgctcgatgcgctcggcgtctgcgaactcagacccgcggtcgcagacgaccagggagaacaccttgccgaaccgggtgccgtagatgtcctggaaggtgtcgatggcatggatgacgctctcggtcgtcttgtcgggcaggaggatgtagaactggaagccgatgcggcgcacgaaaagcgcctggaagtccgaccagcggcggccttccaggcgctgcgcgcggtatctggggcgactttcccccgtctgacgacttgctgcgcggcctgtagcgcaccgccttgggcaaatccagcttggttaacgtgcccatcttggcgcccgccaggtagttgtagaggcttctcgcgccgaagggtatgtcatcggggttggcggctatgatgtgctgcgggctctgccccttggagaggccgtccttgatgacgtcgatggcgtgctcgaagacctccgggtcgcagtctatgccgcttctggcctcgctttgcgggcattcgccaaatcctgggcgtacttagcctcgtagaagcggtacaggtgggagcatccgtagccttgccgctgattgcacgagtttcagcagaagggcgtacgctccagcttcgggcacggcgagcactcgaagtccgggcaaagcgagttgcagagccggtcgcggcactttctgcaaggcgccatgcacgtcgtcttgcaaagcctcctgacctcgcaggctgcgcgcttgacgcagatgttcctgttctggatggtcaggtggccgcgcgggtcgtcggtccagttgcgcttcacctcctcggccaccatgtgctgggtgcgccctatcgagcgcgcgatccacgctatgcggtcgcccctgttcaggccgtgccctatcgccaccctgtcgtcgtacgcgagcgggcgccgggtccgcccctccttctcggaatcggccatccggccctccttccccgtcgggttttcactgcgggaagaaaggaaacgcccctgttgtggggcgcttgtggagttcgcattatctgcgggttttcggggctttgcggggagttaggtttatgcaagactgcaagagaggaactgtcttacgagaattcaatttacaggcgtagcgcaacgggttaattgcaatctgtaacgcacgtatctatgtgcagattgcggagaagagcgttaaatgctgcaattataccccctacagcgcattccatgagtgcggtaagtcttgcaacttaatcggctttgaaacctcttgtgtacgcttcatggaggacatacgtgctgatagatgcccctgttgattcgattgcgagactaaccagtttgcactgcagggatcagtgtcggtatctgcgcttcgctggaaaaatcatcattcgattcccttcatgctgcgaatagacaaggtacttcccctttttaaatatatacatgccatggtcgataaaggaaaaaggcggtggccctgatcccggcctgcgggggccggggccttcggtcagcccagtgggggctcgtttcgagagcaagagccgggaacgcggcctgctcctttcgatgattgccttgcttatgtaaacaggacaatcatcgagacgccgcgcgcgaaccgcggcgtctcgcattcgcggcatcctgaatcaatttcgcttgttagaattcgtagggcagcggaatcccccgccaatcctccctgggcgagagttgcaacaaaataggatcttcgtccgcatgcagcatgccttcgtcgcaaagtctgggcaaagcgagttgcacgggccccctcgcaactcgctgcgatgcatcctatatatgttctctcgcggcctgcgtgcatcgcccttggtccaatgccttcggcgcgcggttttccgagagccgaaggcattgaccgccgcccaacatacgcgtcgacccgctaatctcagggagaggcggtttggcatgccgaggagcgaggtaccgcgaagccgtcgagaagaaccctgtcctcgtttacgaacgcttctgcgaattcgagtaccgcgctgtagaacggggcggtactcgactcccgcagcttcgccgcatactcggcaatccaccgcaggagatggtcgtccaaaaaggcgatctggacactcgccatctcgggaaattcggagcctgcgccaatcgaccgctcgctcatcttcatcatgaaatggagctccgttgcgatatggtcatcaggctccgcgttcaggcgcgccggcctcatgccctgctcggcatagaatcggcgaacggccagagtgctgtcttggaataagcccggcgcgggttccacgtacatggactcccaaggatatgcggcgagtttgccgggtccgacgaacgccttcatgtactggcccctcacggcatctataggctctggcgaactgccgccgacaagggaatcccattctttcctaacacgttcgagcgagactgaaagaccgtcgtcgccggcatcgacgattgacacggcctcatgcgccaggtcggaaacaagggcctccaccgactcctctttcggctcccctgcaagcacgagccataaaagcccgtacagataccgtctagcagccaacaggtcttctccgtccacagactctgcccccttcgtttgactcgaacccattccgttctcccttcatcgcaaggcacgtccgccaaaaaaagagggcgaacgtgcccgactcgccatggccgctcgaagttattcgaccgtctggcggtagtcttcggcgagcgaagcgggcttcgggttgatgagcgtcgtcggcttcgtggttgacgattcgggtaggaagggcagatcggacacgagatcgtcgccgtacttcgccatcatctcatcaacatcgccgaaatcgagagcacgcatggaacaggcgtctacgcacgaaggattcccgccagcggccctccgctcggcgcatgcgtcgcacttctggacgatcatcaaatcctctcggtactgaggcacctcgtacgggcacgcctccgtgcaggtcttgcagccgatgcagatctcgtcgtcgtggatgaccgtgccatcctcctcgttgacatgcatggcgcccgtcgggcagttcgccacgcaagccggcgatgcgcagtggttgcaggccatcgaatagtgccagcttcgcgccgtcggaaacgaacccgtctcgtaactggtcacccggcgaaagttcgagcctacgggctgatccttgaaatctttgcacgcgatggcgcacgcacggcagccaacgcaccgactgccgtcgaaataaaaacctaacgtcatgttaatccgccttccttactcgatgccgccgacagggccgaacacgcgctctgtgtcgtcggctaaatcctcgcccgaccacttctcgtagttcacgagattggtgttgtagccggaaacccccaagccgctcgtatcatgagcaagcatccagttgtcagatccagagcggtccatcgattcgtcgtcgttcaaatcgcaccacgtgccatgaggcagagctacgcacccgggcatgaggcgctggctcaacgtggcatggcgcaagcactgcccatacccgttccaaatgcgtaccgaatccccctcctcgatgcccttctccgccgcgtcttcggcgttcaagaacacgcagttcggaagggcttcgcgaagctgcggaacgttgtcgaagccggtatgtgcacgtcgaagatagtgggggttgtacatctggaacggatagtcccccttgacctttccctcccaatcagcaaaggattcttcgtagccatggagggccggtctgtaagaggggtacggtttgatggagtttcgacccatggcgttgatgccgtcggccttggtctggcagtagatctccatcttgccgctcttggatttaacggggttcgcctcggggtcctctcggaacgcggcgagagcaacgtgaccgaaattgtcgccctccttgcgcggaacctggtagatcccctgctccagaagatcgtcgaaggaaatctttccctcctgcggcttgccttcgaagccgagacgatccagatcctcctgcgtaatggttacgagaggctcttcggtcgtaccgtcttctgcaagaacggtagagcccgcaataaggttgaagtactgctgttcctcggaaataggaagcacggttgcgggatcgatgccgaaccgctcgaggagggcgatgccgatctcctcgtcagacttggcctcccacagcggctcgataaccttgttggggtaaatctggaactcgcggcccttggaggtcaggtaataataggggctgaagcgctcccactgggtctgggtgggcagcaggatgtcggcgtagcgcgcggtgaggttgaagtcgtacccttgatggataacgcagtccaaagagcggaacgcctcgatgccggtggcgatgccctgaatggtttgcagaccgttgcgccacatgttgtagaacacgcggatcttgatctcgcgatcctcaacggtggtgggatcggacatggctccattgcagaagcggtacgcgcccccaatgatcgtcttccacagatcgggtgcatcgatcacatccgtaacgggattggggatgctcttgttaccggtggcgcctggcgcgacaagatcggcaccctgattgccggccgtgcattgctgcatgccgccggtgcagtgtccgggcttgccaacatggccgcccatcgcgccgatggtcatgaagagctgcggaatgtcgtctgcatcgttgcaacgcgcggcagccatggcatgcaaaacgctaaccgcgttctctttgcccatcatttccgcataccacctgatatcctcggccggagtgccgcagatctcggaagcccactcggcggttttgggaacgccgtcgtacttgcccaggacgtaatccatgaagttctcgtcgagaacggcatcctcgggcatatgctcggcatcgaagccaacggtgcatctgtccaggaagtcccagtcgataacgtttccgcggtcttcgtctaactgaatcatctcgtaggcgacggagagcatgaatgcggtgtcggtgcctgggcgcacgcggatccagcgcgcgtcgtagaggttggcggattcgttgtagctggggccgacgtacacgaaagatacacctgcctccttcgcctgctgcagataccagacaggctgccccggagatgcccatgcagggttggcggcgtaaatgacgaggtagtcgcagttgaccaagtccatacggtcgttaccgtcaccgttggcggagatacctagcatggaggacgcgcgattataagtaccccaagacgacgtatcattgatcatagtgcagccgcccagagcaggaaggacattactgccgaacgtgtgttggttagcccatccaggatagacgatggatcggttgccgtcctgctcgatcgcctttttcaatgcggcggcgacgtaatccagggcttcatcccagctgatgcgctcccactcgtctttgccgcgcatctcgccgttgggatcctcgaggctccaacctttccttttcatagggtagcgaatgcggtcgggcgcgtacaccacgtgccgcagcgaccgccctcgcggacatgcgcgctgctggggcatctcgatggagtcctcatgagtgtcatcggtcttttggtattccactacgccatcgaccacgtaggcggcgttgtaacacttgccgccgcagttgagccaacacgcggcagagacccacttgccgtcgctctcgaatgctgtgctttcctccccctcctctgcatcggttaccgcattgcctttcggcgagcagccggcgagcgtaagccctgccaagctggcagtggtggcggctagaaacgacctgcggtcaaggctgacgcccatcgagccgctgactattcctgacattctctctcctcccgttctgactttccagaaagcaactataccaacgggatcagacgagagccggttaacgttcgttaaggattgtttgcgtttgtaagatgcaagaattcacaccaaacggtagccgattccccaatcggtcaaaagatgcttcggagatgcgggatcgtcctcgatcttttcgcgcagctttcgaacgtagaccttcacaacccccggatcccctacgtaatcggccccccagatggcctcgagcagctgcttgtgagaaaaaacggtattcggatgctctgccatgcacagaagaagatcgaactccctcgcggtcatcaccttacgctcccgacgaactgcgacctcgcgcttctccgcatcgatggagagatcgcccaaagcaattacgccgccatgcttggtttccgtcctaatcctgtgcctgcgcaggcatgagttcaccctcagcatcagctcctccgactcgaagggcttggtaacgtaatcgtcggcgcccaggccgaagcctctgcctttgctttccagctcccctttcgcggaaagcattatcacgggaacgtcctcgttgaccgtgcggatatcggaaagggtttcgaatccgtctttatccggcatcatcacatccagtatcaccagatcgaacggtatctcgcggaatagaacgagcgcttcgcgcccattgcgcgcagtaacgggctcatggccttctttgcgcacatagaacgacaccacgtcgagaatgctggcatcgtcgtctgcgatcaggatcttcatccctcatacctcctcgccgaagagatccggcttttcgcacggtaggataacgcggaatatgctaccttcgcccggcgccgacgttacctgtatcgagccgccgtgcaactcaacgtattccttcgccaaagcaagccccaacccgctgccgcttacaggtcttgccaaggagctcttcgtctgcttgaacttctcgaaaatgatttcatgctcgtccgccggtatacccgccccatcgtccgtaacggcgaatcgtatcgtatcgtcctttctgtgataatacgcctcgattaccacgatgccgccttccgaagtgtattttatcgcgttgctccccaggttttcgatgacgtgaagcagcttttcctcgtccgccaagaacaagggaaccttttcggctatgtagaagtacagcagtatatcctttgcctgggcaagcggcgaaagggtcttttcgagagaccccatcacatcgaccacgtcaacaatctgcgtctctagttcgaccttgcccgcttcgagctttgccatctccaagatgttgccgacgagcttcgagagggataccgtactggcatgaattttctcgacgatctcgcagcgggaagagccttcgccaggctccatgcccttaaggatgtcgacatatgcgtgaatcgccgtcagcggcgttcggagttcatggctcatcatcgtgaagtagtgggacttgtatcgatcttcagcctccagacgctcgttcagcgactcgagacggcaagcctgctccttgaggtccgcataggcttcttccagctgcgccgttcgctcggcaacctttcgctccaaaccagacgtcagcgtctcgagctcttcggcggttttgttgaaatgaccgacgaggtcgcgcatttcgtctttggcattcacctcgacggcatctatgcgtacgctaagcttcccggatccgatgtctcgaacggctgcccctatcccctcaagaggcctcacgacataacgcacgacggcaaggtacacaacaaaaagacaggaggcgaaagcaagaaaagagatagcagcctgagaaaaaaccctatcggccagagagtcctcgtacatgctcatggggatgctgatgctcgcagcgcctacgatgtcgcccttttccatgccttctttcggaaaacccgtctcatctgtctcccccgcaggaaagccatggcacggttcgcagctggtctccatcctgagggggatgacgtatcggtagtatggaacatcgcctttcatggtcccgtaggaagtgtactcgccgagggagtcgtcgttgcggaacgcctggagcgcctcggcctccagctcgtccgcttcgttctgagggtttcggggagtgtccgacacataccttataacatagtccgtcctgctggagaacagtgccccaacagaagtgcccactatcgagcagtgaagccctttgaagctgtacgagccgtcggaatcggtgtttatcttggactggttaacggacatgaaatcccatatggccgacatctcttgggaaaggatgtatgcctgctcgtggagcgcctgatcggtttgctctttttgctgaaagtatcccgcaaggatgcttgcaagcagcagcgcgacgacgacgcttgtcaccggcaaggcgatcctgtatttgagcttccattccatggcgattcccaacctagaagtcattccgcggcacaccctatgtggccggcacgtcgaagggcggggaggcatggccttcgattgtacctaaaaacaaaaagatagcattattgcctccgcggcgcaatgcggcgccgtccgaatgcgagtccaatcgggaaccaggcatttccgacctaccgcgtcccgagaaatcgcagcttcgcttcttatgcgctgattcgcaggcggtgcctccctcaacgccgtcgcttcgcgtcgccgcggcgacacgggccccctgtcgattctggactccctggtatgaaggcagccgctaactcgcgcttttcatatgtacaatgtcgagaacgagaaaaccttgtcgtccgcgattgcataaacgacgtcgaacggcggtctcgccatctttcttgcgtttgctccatattctacctacggagacgaaggcatatcgcatgatcctaggacgggaatgcgaggcagaaggtccaagacgtggaatgtctcgttttcaacgcgttccgattctacttgaagcatatcttcgagaaatgcagcgtatagccgacggatacgaaggcgaatatccaagccgagcaaccccgctcgggacaccgaatacctttcgatgccgaggccatgtgcgtcatcgccttcaccttccggactgctcgattgcatggaatgctgggtccggttttaaccaatgtcttgatataggatttccagaaacagtctttcacctcccctttcttgaaactcacatccacaatgtgagtcactagggtcactttcacccgctcaatgcgattgtctgactcaggcccgttctttagtttttgcttcgttcgcatgcaaaagcgaataccgatcgaaagaaagggagaggaatggaaaacgaaacaacgaaacaaccgagcgaagcgaggggacaaactggattctcgcgcaggggcttcgtcggaggtatggctctgaccgccttgggattagcttcggccgcttcggtcacgcttgcaggctgctcgaacgaaaccacccccgatggcaagctctatgcagaaggaatctacaccagcaagcagaagacgccttacgcaactgccgagataacctgcactttcgatgaaaagagcctcacggacgtaacgtatcaggtgctgcgctcttccgaaaaagactacttccccgtctacgcttcggcgatcgatgattattgcgccgcggtcgtcgaaaacggaaagacaagcgaagtcgatgccgttaccggtgccacgttctgcagccttgccatcaaagagggcattgatgcctgcatgttccaggcgctcggcatggcggatgccgtagcggtgcaggagctcaacccgcaagacgaagagtttgatgcgttcgagggagattgcgcagaggtattctcccccattaagctcggggccatggagctgtcgaaccgcattatcaagtccgccggcagttccccatgggccgacagcaacaacgataagatcaccgtttcgaccgagctgtacggagcgatggcgcaaaacggcgtatcgttgatcgttcttgcgggcggtgttttggcaaacaccggaatttcccccgactcgctcgacaagatcaagggaagcgtagatgaagccatcggcttggtttctcctctggtggaggccgtacacgatgccgaaagcaaaatcggattccaaatgtgcttcggcggcgcggcaccgaccgtccccgactccgtgataaacgacactccgattgaagaactcgatcggttcattgaaaacgtcggcatctctgctgagcgcagcaaagcagccggtttcgattgcatcgagatcaagggagccagcgcagatgccctgaacggctttttgacgcgaagagtcaacaagcgtgaagacgagtacggccctcagagcatcgaaaaccgcactcgtctcttctgccgcatgatatcgaaaataaaggaggttaacggcgaagacttccccgtcggcgccctgatcaacggcatcgaggaaaacgacgcgtccctgggagatgacgccctgttcataaccaacgaagaggcgaaggagattgcaaaagctctcgttgccgccggtgccgattggatacaggttcgcgtaggcgcaaaggcgcaggaaatgaacatctgggcgcctgacgttcagcacattgccccggaagccgatgggctcaccgggtttggcaccaagttcaactacaagtcccatttcggggggctcgtagacggcagccattccggattcgcttccttcctcccgctggtcgctgccatcaaagaagcggtagacgtccctgtcggatgcgcggcatgcatggaccttcgcatgggtcccgattacctgaacgaagcactgaagcaggggcagatcgacctggtgttcatgaaccgccccttgaattgcgatcccgagttggtaaagaaaatgcaggaaggccgtcgcgaagatgttagaccgtgcatgaaatgcatgcactgccacgacaacatcggaaccaataaggccgttccctcgagctgccggatgaacgcctcgtccttcaactcgctcaccgatgtgatgcctgaaggtatgacgcctgcgcctgccgagaccaagcgaaacatcatggtcatcggtgcgggtcccgcaggaatggaggcagcacgtgtagccgcagagcgcggtcatagcgttacgatcttcgactccgaaaccaagctcggcggccttctccacttcgcacgaggcgtgaagggcagccacgagcgcttcgacgactatatcgcctacatctccgcccagcttgagaaaaacggcgtcaacgtggaacttggcaaggaggtagacgcctccttcgtaaaagagcaggcgccggatgccgttgtagtcgcagttggcggcgttcgagaaagcaagttctccggagacaacgtgttttcaccggaagatgcgtttagccctgcagcgctcggggaacgagtggtcgtactcggagccagcgtgcaggcgatcgatttcgccgcattccttctatcccaagggaaaagcgtcgcaatcgtcaatccgaatggcgccgatgccgtcgacaagggccaatccggttggtttaagacctacatgcttccgtatctccaagcggaaggtgtcaagatttggagccaagccgttatcgagagcgtcgacgaggcaggagtgacgattaccggcgactctgggttgacgcagacgattccgtgcgatagcgttgtggaattctatgacatggttcccaacctgtcgctggcagatgagctggaaacagccggcatcgaaacgtacgccgtaggtgattgcgtcgagccccataacatccagaaagccgtgctttccggcaacttgtgcgcccgcgctctgtaagatcagctcagcaaatccgattcgggatgcgcaccggcttcaaacccggtgcgcatcccgtttcaccgcgtgcgccgacttcaaaatatcgaaaccccgctcccgcaatgccaatcttcaaatgatacaatccgataacgtcagttttcttcgaaggaacccgaatgccttttcgagacaccgagccacgcgataattttctcttatccgggacattcttgctgtcttgcctttccatcgcgttcttcaagctaacatcttggttctcttcttcgggagcgtttatcgcgtccaacgctcagaacggccccaacgaaatcaccgtacagctctgcgcgaggattctgctgctgatagccgagcgtttctgtccgtacacctctcgacaggcatccatcgtgcttgtcgccgccgcgtcgctccaggcgataggatcgttcctgttattctcccccgttcacggcagtgagcagtcggctttcacggcgctcatcctccgcggcgtcggaagcgctgtgtttctactcgcattcggaaagctgctcggctcgatcgagccgagcaaatcggcgctagcgatcgcaggcagcgaagtactcgttggggttctccctttgttcttcacttcgattccctcagatgccgtttcgttcgtttccgcatcgctgccgctagcagcggccttctgtctgatatgggcacttgagaaaacagttgcacccgaaaacgatccgtccccgatcacgcgagcgcaactgcgaaaaatccccatccacccgatcattcttttaatcctctgcgcgctctcgtccatcgggatagcgctccttggccagactctccaagcaagtgctgaccagttgtacagatatctcataatcgccgtaaaccttctgatattctttgcgtatgcgatctggatttacggcttgatgagaaacgatcccgatacgctctggcccttcctgatggtgataatcttcgtgggtcttttcgtgtactcatcattctcatcgatggctcccggcgccgcttccggactgctcggcgctacaaggagaacgcttatggtgttcgcatgggtctttatggcgagcatcatctatcagcaaaaactgccggctatcccggttttttgcttggggcagctgatcatctcgcagattccgagcacgatcgcgtctttcatcagagacaacgaccttcaaatcgcaagcgcccatcaggagatatccgcaacgatactgacggcggtcatggctctcgccgtaattgcgggagtgctcgtcgtcgtttacaaaagcaaggtcgcgaccgcagccaaccagcattcagtgccgtcggagatcgcgctgaaagccgttatcgacaagctatccgagcggtattcgctatcgaacagggaagcagaagtcgctctgctgttggcagaaggaaacacgcttaaggcggtggcggagaatttgactgtgtccctcgacaccgttcgcactcatgcgaaaaacttatatcgcaagctcgatatacacaagaggcaggagttgcttgacttgatcgaaggtgaattggatgcaggcaagtaaagtctggatttccagtagaaaagcatcgccctgttcgttttttttcttgcggcgaacagggcgatttgcttttcttctcagcggcagacgaggagggggtcagcgttgggcttgggacagcgttaaaggttcatgcccgaaacccgcttacaggttcgcggtgatgctattgatggcgatgcgcccggaattgacgttgttgccacagcaagtagcggcgatttggatgggatacaccttgcggtacagccttacgccgtcggtgccgatcgcatacaggccgtcaatgggctcgccgccctcgttgagcacctgcatgttgcgattggtacccaagccgccgatggcgaccataacggagggatccagacgccacatgtaatacggtggctcgatgacgggcaccatcatcgcaggggctttggcaaattcttcgtcctcgccctgatcgcaggaggcattgtatcgcttgacggcatcggcgagaccgacagggtcgataccgaacttgctcgcaagctcttcaagggtatcggcctggtaaacgttgtccgctgggttggttgccagcacttcttcaaagtcggtgcgtgcgtcaacgtcgcctgatgccgtggcatttgcttcgccgtcgagtgccgcgttcaaaatggcgctgtcggcaagacagaaggtctcgccctgctccaaactgggaatgtaggtcatcatcatgttttcgccgcccagatcctcgttgacgaagcggttgccatccttgtttacccacatgaagggacctccaaagcacagcttgccagaggcctggctcttggcgcctaagcccgtgatgccgggagccaagaggaaacacgcgtcggcaacgcaatccttcgcgccaacggccagacccatgttgatgccatcgccgttgttcatagggttgccgcatttgatcagatgctccatattgaagccccagcggccgagcaggtcgtcgttgtagccgaagcctcccgtagcaagtacgacggccttggcattgacctggatgtcttcgccgtcctcgttcttggcatacacgccccccaccttgccgtcggtgtaaatgaggctctgcgcaggcgtgttaacgcggatgtcgacgccataggaaagcgccttgtccttcatggcgggcacgtagccgacacctgccatgccgccttcgaaccaatgcatggtgtcgaagagcccgccgtaatcattgataaggccgctgaatttgacaccgttgctgacaagccagtcgtaattctctgcggatgcggataccaaatcatgccaagcaacgccatcgctgaggtgcaacgaagtctctagctcatgacggatgatttcgccgggatgcaatttttcgataccctgttcctgctgggcgctggtgttgcatccgaagatcccctcgacgcccgtgccgtttccgccaacttcgcccgcagcttccagcagaatcgcgttgagtccgttctcgcccgcctgcaccgcagcggcaagaccggagataccgccgcccaagataaccacgtcgcagtcgacggtctcggcgaccgtcttcggggcatcggtgtcggcagccgctttgtccgcccgcacgtcgcttgcgccattcgagctgcatgcggtcatcattcccgctgttgctacaccgaaacctgcgactacgcttcctttgagaaagctcctccgatcaagattgactgggttgctcttagtcataacgccctcctttatatatggcttcgctgcgaaaaaattgcagctccgaatggtgccattatgttctctgggggtcggatgcgcgtcacggttcgagggggaaacgtatcaccctttaagcgtgatatttccgaaacgggcagttcgaagcagccgtcagtggcgagtgcgttgcagcattcggcctcaagagtggtaccatgtgaaaagcgcgtttcgggagggccgcatgaccgctcaatacagcagcaagacattaccaatgttattcgcgggttgggcaatgttccaagcttggccctatgccgcatttatgagcgatacgctgcttcctgcgcaagccgtttcgggacaatcgttctatgaagccgcatggcccgtctcaatcatttcattcgcagtctgtctgttggcggcaatgagcgtctctgcgcgcattgaccaatacctctccgaccgccgccccatggtggcgtctggttttcttttgatcatgggaaccgtccttattgccgtatcgggttttgccgagagcgaccccgcattcggcttgtgcgttgtcggcgctgcattcaccggcatcggtacggcctttctgcaactgtgctggcaaaaagtccttgtaggcatcccctcgaatcatctcgccttaggtgttcctgtaggctactcgttctccttggttctggcgtttggcatcactgtcgctcctggcatggcagacaaagtgctgctcgtcttcatgatcgtggtctccatcgctgttttggcctggttcatgaaatgcgataatgctccgttcgaagggctcgcctcttcgaacggagcggcgctcggagacgtttcggcgaacgagttctccaagatactcccctcccgcatggtgcccttcacctttgtgctctatatcgttgtatggtttgctatcgaagtggttgaatcccaaaccgcgtccatgcgcgtggccgatgacccgcaattcatcttcagggcgctcgtgggcattgtcatcgccttggtctgcgtctgttacgactttttcttttcccgcagcactcacacttcgtcggccatcaaggttgtcgtgctgctcaccggaggcgccctggtggtcgccctgtccggattgagcggagctctgctgttggcgtatatcatcaactatgccgccaatctactgggatgcgtttttctcatcctcgcctcagtggagtactcgaaacgcatggagcgctcaaccgcgtatttcaccggactcgcactcgtgcctcggcatatcggcgtatccgcgttcgcgcttattcatctggcggtgccggggattgcgatcgagccgctcaacaccgcaatgctcgtcttgcttctagcggtggcgcttttcgttctgccccacgcgctgggcggcgcgagcgcggcgtccgtagaagaaaccaacgcgcttgaaccgccgctgcccgagatgccgtcaactcgcgacgacgcggtgtgcgctctcattgcggaatacggcctcacgagacgcgaagccgaggtgttcgaactgttcgcgtcgggtcgcgattcgggatatatcagggagagactcgtcatctcccgcgacacggtgagcagccatctcaagcacatctatgccaagatgggcattcactcgaaacgcgagctcttcgatcttatcgaatcccgtaaacaggtttgagattcgatggtctgcgcagagcctctcgccgctgcgcttcgaacgcttaccgatggtcgtctgagaaacacttggatgtcctccgttcgagagcagaggccccttgctgtagcgagcgaatctcgatcttactcgcgattgattgactcggctaagtccatcagctcttcacgtgagtttacaccgcatttcctataggcgctgcgcgtatggctttgcactgtgcttaccgagatgaaaaggcgttccgaaattcttttgtagctgtaaccttgcgccagaagagaagccgtttcagcctctcgctccgtaaggccgtaccgacgactcatttccgaagataaaagaattgcctgcccctttgcttctgagccctgattggcggcggatgccgccgtgcttttcgcctttccccttgcagccagcaggactcccagtgacacgagcatccctatcatgagcaaaaacacgcatagagcaataactccgtatacgcgatcttcagccgtttcacccatcgccgacataagagcgggaaccgcccagaagctgatgaactgcgttgcatacaaaggcagcaagtaatatttcaggacttgtgcaggcggagggcattttctcatgcgaacggttgaaagcagcagggagagcaaaaggaactcgagacaatttctcgcaatgctgattacatccattccgaaggtggatattcgattgggatcagcgaaaagcagaaacaggccgatgatgaaaaggaagcaaacggcaatgatcgaggcgacgctcgatctgttggatggtttggcgaagtacacgctgaaagcgagcgctgccgcaatcgtcggtgaatccgcttgcgaagcatctgcccacgccagcatgacctgcatcgactgccacacagacgaggatgctttggctgctgcgcatagcgacgcgacctcagcaagcaagatgccgaccaagctcaaacaaaccgaagtcgagaattctctgtgcctttcatgccatgaaggcactctggaaaatcttgtctcggcaacggagggaatcgcttcggtcaccgattccaaaggaacagcggtaaacccccactctgttctttcatcggaacagcatgccggcatcctgtgcggcgattgccactccatgcactccgacaagggaatcgaagaatccgcccatgacgaatgcatctcgtgccatcatgccgacgtgttccagtgctacacgtgccatgactagatcgggcaaggtccatagtttttcggcgacgctcccgcatttgcagagcgtcgccgagcccgcaaagacccaaaaggattgaatgtgttatcttccagggcgcaagggaccgtcgctattcaccgttgcgtcgtttctcgaggaacagacgcgcatgcttcacgatcattgcgccgatcatgaagtaagcgaggtatcccgaaaagggatagatcgcgttgagcagctgctcgtacggcagaaacgacacaatgaagatgccgatgacggccagtacggtagataaggcgtatcgcctcgagtgatcgtcgccgaaatgctgagcgaaagcccagacgctgggggtcaccgtcgtatagatgccgaagaacagcacgatagcgaatacggcggcagctgctgcaggcatatagtgctgaacaagcgccaaggtgggaaccgcctgatcgtagaccagttcgatgttggcgagttgggataggataacgagcgaggcgccgacagccaacgcgatggcagccaacccggcgccgaaaacggcctctttcttggaggaagacctcactccgagcgctgaagcgtacgaggtcaatgggtagacgttggacataccgtacagaacggctgacaaaagccagaatccggaggctttcaagatgggagggtcgcatgactctatgaactcgggggcatgcgccactccacccggattcccggcgagcgatacaatcgcgatcaatgcaaggcaggtgatgatgagcgggcccagaaagccgagaacgtcgagcagcttgcgcaagccggcaagcaccgacaccatgataagcaggcacattatgccccgaccgatcgcttcgcttatgccgaagtactgcccgaaaaccgtgccggccccagacaccatggtaacggaaaccaagaacagcaaacaaacggtggccatctcgtaaaacgcaccgatgcgtttaccgcagtagtagcgaaagatgtctttcgagtggcacatgcccgtccgaacgcccgtaaccatgaagctgtagaagatgaggaacacgcaggcgtatgcaacgaacgcgcccgcaatgcccacccatccctctgaagtgtagtattgaagcgtctcttgacccgttgagaaccccgctccaatcatgaatccgataattgcacccgtggtcttgagcacccttttcatatcgatgcgatcatctgcctgcagcccgatcggctgagcttcgcctttggcgatttcggtcatatcccctatcccccatctgaagacgatgcaagcatgtccgatcctgcccgctcgcagcggcgcgccgctcttcccgagatgacgcgccacatgtgcgggcagcgctctgttccgctattggtcgttactggccttttttggcatgaacatgacgacgttgctcttttcctgcagccacatcaggttctcgacgggccgacatgcaaagcccctgtcgtacaaagcttggagcacagaggattcggatccttctcgtagcattctacacatttatcgatcgtaggagccacaaggtggtaaaggcgcagttttccgtcgacgtagcccggatcgcggcggacgacctccatccatttttccttatagctgaatccgttgttcgagcggcaagcggtctggcaggcgaaacaacccgtgcatcgatcgatattgagcagcatggcgatattactcattgaaatcaactcccttctttacgcggcacaacgacgagcgcatcgcggttgcgccgtatcgcggctcggccgggcgggaaggaaccagcacgttcggatttgcctgatcccatccgtacccaggcaagccgagctctttgcattcgtcgcgccaaccatggcgcggaacggcaatgacgcctttgaggatctcgtaggttacatgcgctttcgatttgatgcgtccgcgcggcgattcgatggttgcccactcgccgttgtcgatcccgatttcccgtgcatcgtcggggtgtataaggaagaaaggatgcggatacagctcgcgctgagcggggatgttcgtccatgccgaatggaagaaggcgtagaggcgatgccccgtgacaagggtgaacgggtactccttcgcaagttcgggttgcgatacgggggtttcggcgggttcatcgtaatcgggaagcggatcgtagccgaatcgagcgagggcgtcgcaccagaactcgattcgtccggtcggcgtattgaagccgagctgcctgtcggggcggatcatccccttctcgtacttcttgtagaccggcccctcgcttccgctgccgtcatcgagcttgaagtaggctccttcgacgtactcttcccaggtcatatccatcccaagaagctcgcgcagcctccagagcaccatttccttctcgtctttccacggccagtgttcggggttgagccgtttgccccattcgaggaagaacttccagtcatcccagcattcccccggtgggtcgacggcgcgctccgaggagataacgagtcctccgaaaagctcttcgtcaatcgtgtcgcgctcggaccagtcggacgagggaagcacgatatcggcaagcttggtcgtcggcgagaagtagaaatccttcgacacgatcgtgtcgacgttgggcgaagtgatagcctcgtgcacgcgattggcgttttcgtagcacaaaagcgggtcgttcgcgatgaagaccatcatcttgacgggtctcggctcgccggtgatggctgcttcgaaggttgttgcgggatcattcgaacgtccgaatactttgtagagcgggtaatcctcgccgccgaaggtgaacaggtcggagcgaccggggtccttcatgggatcccatagggtgatgcgatcatcgagcattgcggaaaacgcgacgttgatcggaattccaccgggcacatcgaggtgtccgagcataccctgaaggcaggcgatggcgcggcccgtctggatcgcattggtatgcatgcaaccggggcccaggatggtttggaatgcggtggggccgttggttccgagcagacgcgcgcatccgacgatgtcgtctgccggcacgccggtgatcttggaaaccttctcgggcgggtagttgcgcacgcgttcggcaagttcatcgaacccgtaggtccacttctctatccaatcggaatcgtagagcttctcttccacaagcacgttcatgaggccgagcgccaaggcgcaatccgtaccgggacggggctgaagccagtagtcggcgttcttggccaagtcggtatagcgaacgtcgatcacaacgtatttggtctgtcccgattcgatgcgatcgaggatcatcttcgccttcgagcgctgagttgcgggactcgccccccaatgaacgatcgtgctcgcattcgccatatcgccgtcgcagtcgctgtagattcccagcgtgaaggcgttcggaagcataagcggcatgaggcatacatgtgtcggagcgagcgaccagccttcaagcccgagcgaggaattgagccggcagtaccagtggttcgtcgtgcgacccgtcccctgtcctgtgacgatggcctcaggaccgtattcgtctttgatgcggaagcattcttccgtgatgatgtcgagcgcttcgtcccatgaaattcgctcgaactcgcttgttcctcgggtttcgggatggcgctcgcccttaggatcccaatcaacgcgcttcatcgggtagagaatgcgcccatcggtatcgttgtgaatttctttctgggataaacccgatccgcagaacacgccctgggagcgcgggctgtccggatcgccctccacacgcactatcttgttgtcttccgaatagacaaccgcgccgcatctcgcatggcacgtggtgcacaccgtgcgggtttttctaaccgtcattgcttgtctccttactctttctctcggtgtcgttaagcgatatgcgaaatcaattcgttcgcaggcatgctggttgccgcttcccgcttcggcgaggaggatggaagggggtttgcggcgatcgacgcacctgcccgaatcaagatgagacatcgcaaggtgctcatccgggtgatcgagccgcccggatgagcggtgccgttgcgtttacgattcggataaagcggttccggcgtcctttttctccagcttcttcatagggcgagtcgcatatgcaaggatcatgcaggcgatagcgatggccccgagaaacgcggtaaagagaaacgcgttgttgatgcccatcatctcggtgagtccggagagcgcgaccatgacaaccgtgtgacctagaaagtacgcggccatacaagcggcgttgatgctggtgtagtgcttcatgccaaacagatcggggatgaacagcgagggcaggatggcaacgacgaggatggtcgaagtgagcgccatacccgcaaacacgagcgggaatccgccagccgaagaccatacgaacagcgatacgattccgatgatgaaaagcccgaacacgatcacgcccgttgtgcgtgccccgaatttattcgtcagaaaaccagcgaaaagcatcaggatggctcccaccagcgtatgaatgccgaaccaagaggctgctgtcgccgaatcgacgccgtaggtagtgaagaacaccgtagagaacgaaccgatcgcgctaatcgcccacgcgccgatgaacacgacagcggcgaagaaataaaagcaggggcttttcagagccgtgctcaaatcgacgccgatctgggtaacgggggtctcctcgaccttaacgtcatcttctttgaaatgcagaggcttaccgggaatcttgccgatcagaagcaggttggcgccaacgccgaggaccaggcagctgacaaccaggaaccacatggccgtacgatagtccgcgatgctcaagagccacgcaccaagaaacacctctgcagcgcacatgagagaatagacgccggaaacgatgccgtaaaccgattgcgtgcgggaaccccagaacttggcggtaacgcccgatgctgcggcatgagccccgaacgacatgacgatgccgttgacggcgtttgcggcgatccacatccatacgtggtcggccacggcgaacaccgtaagcatcagcgtcacgcagatggtgccgatcagaagcgaccatttgggcgtcagcttttcaatgagcttcgtggcaaccatgctgccgagaaacgccatgatggtggcgacgctgggaccgagcatgaacaacgtaagcggcgggttccccaatcccaccatgatgtccgggatcatcgcattgagaacgttggtcatgcccgttcccgtagtcagaatgattgcgcacccaacagctgctgctgttgcgcgagcctttgtgacttccgtcatttcaacccctttcgaattcggatgtttcgctttcccagtcctcctttctggcaagcgatatcgttcaatatagggttcgccacagtcgctcgaatcgcaagaaaagacgcatttcgaagagctgcagtacataccacgtatctagcacgaaaagtagtagaagggcattttcccagttcaagatatatggaaaaccattatgcgggctttcggcgcatatatgcccactcccggccgctctgttcatgtgccgcagaataggctatgctagcaaccgttcaaggcgacttgcgatgggatgcgatgattttgcggcaaatcgggggttcatcgcgggcaggcgcctagctgaacgacacagcaatcaaatcaacgcaatgcaatgcatgccccgtgcgatacgcgaggcaggaggacgacgtgagccacagcaccgatctttcccatacgatagatttagcacgggtaacgagtgccgagagcgacagggaactgcttttgtcgctgtattcggttgcgcatctcgtcttcgcctggtacggcatcgccttctttctttttgccgcaccgcaaaccgttcggattgaaacgttttccttggcgaaccttcttcccgaagcattcgccgtctcggggctgctcctggcatacgtaaccgttcttcgcgttccggcgtttgaggatttccagaaacgggcgaaggtcatcatcgtcggaggcgccgcatgcgccgttgcggccctgatcctcggagccgctcatgcgttcggctacctcccttctgtcgtcctctccgttatcgcctcggtcgttggaggctacgccgtcggcgtaacggcgcttttggcacttgagtttgcggcagggttcaagcgcaccacgtttgccgtttgcctatgcgcatcgatgatctgcggaatcatgctcttttgcactatgtcccttatcgggatgtgggcatgcgtcatctgcttcatcgccctttcagccgcaggatcgctgtgcggtgtctgctatgcgaaaggtctcgtcgaaaccgacaaccctgagaggcttttggctgctcaagcattcgacaggcttatgctcaactctaaaacaggttggtttttcgtcctgtacggaatcaccgtcgggttggtggtcggcgaagtcaacgaatcgcaggcgattggcggcgattcgctttggattgcgggttccttagggttcgccgcaggcaccgccgtatctctctggttgatggtgaagaatcaaaaccgtatgcagatcggggtcatacaacgcagcgtgtttccggttttcgtcgtcggccttctgccctggacgatggtgagcgagaatcttgccgctgttacgtatgcattgatcttcgccgggtgcgcgatgttcgttgcattcgctttcgatacccactgctttctttccaaggaatattccgtacctcccctctaccctatcgttttaggatcgcgctcctttgtaaaagggcttctggcaggctcccttgcggcgattgcgacgtttgccgtatcggctattcccgatttgctccagtatgcaaaattggcgatgatcgcgattctcgccgttctcgttacattcgttcgggaagaaagggatcgcactgaaggttctgacgctgcttcagccgcctcctcatcgtctgtcgagagtgtatcccagaaggctgatgacgaaggcgcttcgaggagggctggcgcatggaagcgctcgtgcgctggccttgtcgagcagtattcgctcacctcgcgtgaagcagagatcctcgagctggcactcaaggcgtacagtgcagagcatattgccgagacgctttgcatctcggcgcatacggcgaagacacatgtgtaccacatctatcagaagctgcggatcaacagcagaaaagagctcctagcgatcttcgaagaatgcctagaaaaggagaaggcggcaacccgccacgaggcgagctgaccagacggggattaatctaatttcccgagaggcacctggatcaagattttgtttttcgacatttcttcgcagattgatatccattgatccgctacctttaagtctggatattcgcatgaggggcaacgtgtgtagctcttttgcccacggatttcttcccgcaagcattttttcattcagcatgggccgttaggctaccttcagcaccaagaaaccgcaaacccatttataattaaaacgctaatcgaattgggttgggagcgggaatgggaacggttaacgaaaaacggttttacatggcggcgcttatcgtcttatgcctatgcttcttgggcttcaacatcagcttgaacgataagacggcatacgcagatgaaacaacaagcaacggcttcgtggtgccagttgaacagaaaaacaatgttccccaaggctatatcggaatctacgatgtcgatggtcttctcgccatcgaaaacgatctcgacggaaaattcatcttaatggacgatatcgacctctcaagctactctggaactctttcgattggcggctcgcagctgagcacagatggattcacgggcgagctggaaggcaactggcatgtcatcgatgggatgaagatatctatcgacgaaccggataacaggcaagccctgactgggctcttcggagctataagaggcgcctccatacgaaatctcgcattcgaaaacgccaatatcaagttcgtggaccacgaacggaccaacgactccatacgctacatcggcgttctatgcggccatgcaaaagactccactattttcaactgcaccgtggaaggaacagtgtacgccgaagacaccggcgatggcctttggacgcgcacagggggcatatgcggcagcgtttcgggaaacagcctgatcgaacaatgcaccaaccgcgcctccgtaacgagcccggttggctgcggcttcgacctgaccagcgggggcatatgcggagaactcgacggaagcgaggtctccatccgaaaatgcacgaactacggagcggtctcgggaattgatgccgccggaatctgcggttatgcgagtacgaacggatcgtctttctccgagtgtgcgaactatgggaatattacggcgactgcgaaaggggcctcttcctcgggatacgccggagggatcgctggattctcatgttcctccttcgaaaagtgcatgaatgccggggaaatccgtggaagcaactacgtggcaggaatttgcgcatgggggcaaaccgtgcggcaatgctacaacacgggagctgtagagagctccaatacgacgaacgtcgaaggaacctatcaggtggcggccggcatcatagcgggcgaatcatcgacagacatcagccatgtcgtgatcacggactgcttcaacacgggagaaataagggcgatcaacacgaacggcgacctcgaatacgattcggcatcagccggaggtataaaaggcagcggaaatatggattccgtcgaagttgcgcgatgctacaacaggggaaacctgcatgcgacgtcagacaacccggcaaaaacgaaagtcggccacatatgggcaaggggcgacaaccatggggatgcggttccgtcatcggacaactattccctggaaagcgccaccctcgaagcagccataatcgattcaaccgctcaatgtacggcgctggatgaggagagtatgaaaaaggcatccttgttctccggctttgatttcgaaaacgtttgggggatggggccagaagattacccctatcccactctgaggggaataccgaacggatacgccagcaacgatccgaacggcattccggataagcccgtcgtggacccctggatcgagcccgatcccctcaccgccgttgccgcgagcgaactcgcggcgttcgtgacgagcggcggtaccgagggcgtgctcgggcagtcgtctatcctacgggaactgacgagctgcgagctttccgaatggacggaggccgcaagcttctacgatcggccgatatggaaaggatcggacgcaaagcgctgcgacctcatcgaccaggagcttgactccgcccgcgtcttggagtactcgttttcgccgaactatgtcgtcatcgaaagcggaagcggctgcatcatcgcgttcgggaaccatcatggcatggacttgaagaccgcggacgagcacttgaaaaacgccttgcaggtttatcgaacatatgcggaccgatacggagccgatcgcatgttcatcacgggaagcgaatacggaggttcgcttgcctcctatgtctgcacgctgacaggggcgaaaggctgcatcttcaacgcttcgggtgcaggctacgacgcggcggtcatcaacagctacctagatcttgcaaactatacgggcgtggatggcatcgcctgcacccactactatacgccaacttattacgacgatcgtctgtcttcgggcatcctcggcctgcgcgacgcgatggacaatttctggtcctacccgtccatttcggttgccgacaacgggctttccgatgacgcgtctgatatctgctcgatgtactccgccgtggacggcgcctttacattcaacaacctgttgagggaggaaagctcacgggcgaccgtccgcttttccatggagccctccgctcttttcagcacgctcgcaagcgccgtgcaagggaaaccggatctctcgctattctccaagagcattgtcttatcgctcggaacaagcaagcccgattccttcaattccgtttggaacgattcggagaattggttcacccagctggttcttctgggagacgccggttcggggagcgacaaagccaaaacgggaaactggaacgacaccatcgttgccggagacggaacctcgaagctgaatggcggctggggcggcgacctctatgtaatcaaaggggaaaaatgcactgtgacgatcgacgattacgcccaaacgggtttgcagtcgggcgtgaacatcaaaaaattcttcaatctcggaaaggaattcgtcgattccgatgacatcgcctggggtgccttgaacggcacctacaagatcatcaaactcctggatgaagaaagcttgctccaaaaagacaggttatacctgcctcatgcagaaatgagcggattgtccatttcggaaacgggcgaatactacgtcattgaatatggtgagtccagaatcaacctaaacaaaaatcgcctgttcggacaagacttcgagatcctcgacaaaaacggagataagacaacccttaaaaagctgatgagcgggaaagccgattttcgctcggtccggtcggagtctctagaagccagcgaaggcggcaccattgcttccgtggccgtcaagggcgtccaaaccgcgtacgtacgcgatctggacggcaatatgctgcatgagatggatgccgcttctccttgcgaaacattcgagccttatggctatttcttgagcaacggagaagggtctttcgagttcgaatacgacgcgtccgctgtcgaggtatctttctcgggcggcacggtcaccgattgccgcctggcaagcatggatacggccgaagattccgatttgagaaacgcggccaccgtgcaggccactgacctaaacggagacgaactgtatgcagattgctcttcgggcgaacccgatcttgttttacgggattcggcaggtaacgcgatcgaaagcattgagctggacaaaaccacaatcgagcagcggcctactgaagacatcggggaagctgttgcagaagaaataaaggaccaatgctacacgggatctccaatcgaaccaagcgtcgagctggctctttcgggtgtggcgcttgaaacgggcgtcgactacgacctgcgatacgacggaaatgtcaacgcgggaacggcttccgcgattgcggaaggaaaagggaaatacagcggcagcaagaccatcgggttcgagattacaccgacctcgcttgccgatgcgaaggtagagctatcttcgtattcatttccccatactggctcagcgattgaaccgaacgtgaacgtctcgctcgggggcgtagcgcttacgggaggaaccgatttcgaagtttcctatagccaaaacagcgcgatcggaatagcgactgtgacagtgacgggtacaggaaattatacaggcaccgcgcaaacaacgtttaccattgaagccggcgaaccggaacccgggcccgacccccaacccgcccctgcggtcgcagagcgctgcgggggcgccgaccgctacaagacgatggcgctcgtctcccagcgggccttcccgcaaagcgggtcgtgcgggaccgtcgtcgtggcgcgcggcgacaacttccccgacgcgcttgcggcggcggggctcgccggcgtgaaggggggccaggtgctcctgaccgacaccgattccctcacccccgagacgaaagccgagatcaagcgcctcggggccgccaaggcctacgtcctcggcgacaagaacgcggtctccgacaagacgttcggcgacatcaagaggctcgtagggggcaacgccgagagggtcggcggcaaagaccgcatcgacacggcgctcaagatccacggggcggggggaggcggctgggggaccaccgccatcgtcgccaccggctccaaggccgcagacgcgctctccgcctcccccctcgcctaccgcctgaaggcgccgatcttcctcgcggattcggacgggagcctctcgggaggcacgctcgacgccatccggaagggaggcttcgacaccgtgctcgtcatgggctccaagtactcggtctccgcaaacgccgagaaggcgctgaagaaacacgcggcgaccgtccgcttcagcggggaaacccgctacgagacctcgaagctcacggcggagtgggcgcttcgaaacggcttcacgtgcaggaacgccgtcgcgacggcggggcgggagggcaagtacgcggacgccctcgtggcctcgtcgctcggcggcatcagcgcctcccccctcctgctggtggacgacggggcggacggaaccctctgcgtctcgaaggtgatcgccccgcacaagtcgcaggcggagaaggtctacgtgctgggcgacaagaacagcgtctcggatgcgatccatgccgccatacggaaagccatccgacaatgagtgaaggggcttggctcaatgccgagccaagccccagaagagcagcgacagaggtgcaaactcttaaggagacgccatcgtaaacgggttcgctccgaacggggcgcaaaagaaacagcgatggaacgaagggatcatcttcccccgaaaacccgtcgcagccctcacctcttggcactgggaaccaataaaatagccctcatgggacaagcgtcaacgcatgcaccgcactgggtgcactcgggtatatcgaggctatggggatcgaccttttcagggcagatatccacgcatacgcggcaatccaccccttgcgttctcaggcaagcgtcttcgcccacgcgcggacgaacgattcgcttcctgctcgaaagaagcgacagcatggcagatacggggcataccttaaagcaccacgatctgaaaataaccaactcgacaacaagcacagcggggaacacgatcaagtcccacatgaacacgtgctgggaaaacgcgtagccaatcgctaaaacggaggcaaatgtcaaccctatggggcacgcgaggcagaagacgggaaagcccaaaacgaagcttgaaagcaaggtgccagcaagaaccccgtggcgcccgtctataagcctgccgtctcgcttgcctccaactgcgggtaacggatccttgctgcatgctgcacaatgagcaacctttcgctccccttccggctgatcgcaggagcatgaagcgcatttgcttcccaggcgcgcatcgtcgtccttcgaatccctcacgccgaagatacggcgcacccaaggagtggggcatatccacgagcaaaacgccttgcctgcaataagggtgatcacaaccacgatggcgaagcaaaaaacaccgctccacgtgggaatcttggtgctcagcatgctttcgagaatgcccaccggacacgcgtacatcaagccaccgaagccgaacgacgaatacgacccgaacccgagacgaaacacgaacgacccgatggttaaaccgataacgacaagcgcaacgagcgctcgcatgcgcgacatcttcatcatgacaccatgcttccgacaacgcgaatcgctcgtctgccatcgccatcgtaatagctaaggctggaagacgggcatgcgtattcgcatgctccgcatccgttgcagagagattcatcgacaagaggtagcctgctctcgtcgttccacgacaatgcctcgtaggagcaagcaggaacacatttttcacacgagacgcatttggccgcttcgaccacagcaacaccgataagcggctcagaatcgccatcccacgcctcaagcgcgccggtcggacacaccccgacgcacttcccgcagaaatcgcagtacccccgtttgaaatcaagataaggagtccgcgcgttgacgatgccgtccgagaggcccgctggctggatgcaatcgagcggacagctcgacaagcattttccgcacttgatgcaggcaccgatgaacgcttcttcgctttggccactcggaggtctcagcaacttgcgctcgcctgcaaaagcgctcaccgcccacccgaaagccgataggatgccgatcgagcacgctcccgagatcatcgcacgacgcgtaatagacataaggatcgccgcctgcagctagtgcgaaagagcctgctcgcatccgccgcgcagctcaatgccgacgtcgttcatgattgaaccgtcaagcttcacccatcctcgcgtaaacttggcaacgccttggtaaaacggcgttctgcaattctcttcgatggcatcgcaaaagacatcgatccagttcaaaagatgctgctcgtggaacgacgcctgcacatcggcgatccgaagcgcttcatcgcaatcgcccgcttcgatcgcctcgttttggcgctctgccataacggcaagaaactccagttcaaacgcaatatgatcttcaggcgtacgaagatcgtccataggggaaacatgctcgtcgtagtataccttgcacacctcgtcgcgcggcccctgcataagcaagcccgtctcggacataaagacggactcgaaggggatagccatcctatcgtcgttgttcccagcggcaagaaacgtatgggcgtaatcgacggccagttcctgacgtgttcccgagttgcatttcgcaagatacgacttgatatccgcccatccgtcatccatatcccgatcgccaagatcgagcgagccgacatccgagcatcggatccgctcgatctgttcgctcgtcagctcttgccaatacagcgatgacagcaatcgatacagcgccgccctgctctggttcaatgtcgttatctcttcggtatgctgtttgcgctcagaagccatatcgcttcgtcctttccaatccgaagacctttgccggccgtccgcccatcggggcggacggcatcgattagcagcaaatcggcggcaaaggtgtttcgaaaactaaatcatgttgaagaaatcgttaatcggcaccatcgaaagccacatcgcacaacgaaacgccatccccgcacccagggcgagaacgcatcccactgcggcgagcgcggttgcgctttcaggcttcttcatcgcaacgccggcgcaaaccgcagctgcaaggttgccgacaaccgctgctatcgcccacgatccagccgcattaagaacctcggggaccatgaaaacgtacagcgccgcaagcacaaccccgacgagcgatcccgcaagagcgactttcgcgaaaaaggacgcatcttctttcgaaccgcgagcaccgacgagcgcgaggtagacaagggagcccatcgccaaagcggttcccagatacccgagaggcagcaagggggtatcccacgccgggcacgagctcatcatgtacgacgagccagccatgaacgacaaggcgacgccggctatagccgagatgaccagaaacactttgcgaaccgtatcggaagccttccttgcatgcaaaaccagatacacgatggcgcacagagccgagattccgaccaaaaccgcttcgatgaaaatacctgaagtcggatggctcaaagctgcaagcatgttctcgggatgcgagagatgcagcaccgaggcaaagccgccgacagccatcaggacaaggcccgaaagcatcgcgataaatctcgtccgctccgcccgattcgtccattccgagatcagcacgcatgcaaacagccagccagcgagcccggtcaacgccgtaaacagaacaagggaccactgtatgctcattgcaccttctccttccaactgctttccggccaatcaggcgttatcggctgcagattcccactttcgatccacggggctatgcgttccgataagatgtagcgcgcagccggtcgattcccgacatcggtcaggcaatgaaccgaatcagcctcggcttcggcaatggccttcgcggcaggagactccggatcatcgagatccccgtagaaacgggcgtcggcgcagcaatcctcaacgcatttggggagttcgcccgacccggtacgctgcgcgcagagcgtgcacttctcgacgacgttttccttgacgttccacgaccgcacgccgtaggggcacgccatcatgcagtacttgcatccgatgcacttgtccttgtcgacgagaacgatcccctcttcgtttcggtaactcgcgcccgtcggacacacgtgaacgcaaggagcgtcttcgcattgctggcactggacgggcagccagtacacatgcaaatcggggaactgccccataggcccaacctgcacgaccttgttccaatagcttcccaaagcgaccccgttttcaactttgcatgccatctcgcacgcatggcagccgatacagcggtcaacgtttaccactaatgcatagcgactcatgattgagaacaacctcctccagtcgaatcagagggaacaggcatccacggctcgaagtctgtcggctcgtaccaaataccctcgggtttgcttgccttttcgatcttcacgtttacggctcgcagagaatacgaaccgatttcgggattgtagtagccggtgtttttcgtcagcatgttcacgttcataagcgtccacgacttgcgtccgtcggagccgtcctcgagaaattccggattccagaatcgctccatgtacacgcacccttcgggaatgcccagcgtaacagtcgcctgcgcatagatgccgtcggcagcagctttctgcccctcggccgtcaactcgtctcccggattgaactcggtggatcgaccttcgattgcctgtccggtttcaggatcgatgcccgtagagatatcgcggaacacatcgagaccgtcggtacggggagacttgatgttgacccaatccccgttttcgataccgtacttctcggcatcggcgggagtgatccaaagttccggcgcgggatagagctcgcgcaggtacggattgttacgcaaggtgccatggtggttgtgcggaagcctgccttgcgtgaggatcagcggatactgatcgccgtacaagacgccgtcctcgggttcgtagtaatacggcatcgggttgtaatcgaccgacgacgacggcatctcgaacgcctcttcgccatgacgaccgatgtagagcagctggtcggcgtacggcccgctctttctcggcgaatcgacgatatcccgaggcgcggtcgtgaaccccttgtacaaaccgtcctcgccgacggccatgtagttgcgctcatcgtacggcccgtccagatagaactcgtcatcgggagtcgttgcagcgggaagggacttcttggcttcttcgaagctgctgtagccgacaaggccggaagctttatcgtagtactcttccacagacttgaaccaaggaagcacgccctcgccgatcttctcctggtcaaacgatgcttccatgttctcgtcgtacagatcggtgcccggatgcgacatcgcctcggcgatcttcgaccacatcatgatctcgtctgccgcttcgaacaaccgcgccacaggctgcctgataagcatgtagttcatgcggggttgcaagaagaacgtctcgagccactcgcatgtcggaaacacgatatcggcggcttccgtcgtaaacgaggtgggatacataaagccctgcacgatgcaatcgaaattgggaatcgcctcgagccacgacgacgcgtttgcaagcgcgaccatcttatttcccgaacgctcgatccaaactttcggctgatggggctcgcccgtcaacgccgcggaaaggcaggtgggcgtatgggaatgctgccatttgcccaacgccttatgctcggtgtagccgagacggtggacgatctcttcttgcgggtagaacgggtagttggtcggtccgaacagcgccggcgggttgatgatcgatccgagcgggtcgacgcccaggtcgatcgaggggcagccgtagtgaccgaggtgcgccgtcatcgaatcaagcgcggctacgccgagagccgcctgaacggagttcggctgctggtcggtcgccacgccgatcacgattccaccatggccgctcgagcaatagatctcgatagcctgctttatctggtcggcattacatccggtaacctcggcggttttctcgagcgtccactcagcgcagcggtctttatacgcctggaaggccgtcttgcattggatgaccgatccgtccttgagcgtgacgtcgaacgtaccgaacagctcgggctgatactccgcctcgttgtcggggccaagggcgaacgccttcgtcagacccttctccttgtcgtaataaacgtaaccttcgttttcgacatcgcaatcttcgaacacatccgaggccctgagaagcatgccgtcggtcgtcagatcctgggctacaggcgggagcttgacgccgtcgcgcgcgtcgacgaggaacgggaggttggtgaacttctcggtgaacgtctcgtatccgggaatcttctcgtacagcttgttctcgatgatgtagttcatccatccgagcatcatcgctatgtcggtgccgggcttgatgggcagccatacgtccgccttcgaggcatcgggcgtcaatcgcggatcgatgactattgtcttgcagcccatcttgcgcagcttcgtcataaccatgccggaagctgccggggagtgccatgcggggttggttccccacagcaccactacctcggcctggtcttcgtattttgcgggcttgaagagctcgacggtgttcatgtccgccatcgacggagcggcgcatccgcttaccttgtcggtcgcccagaatcgggggagccagcattgagcctgccctggctcgaacagatctccagcaccccagaagttgcggaatcggttgatggagaagaactgcgggtttccaccgccgcctgtggtgcacagaagaccgcgccgacccgttttgtccctcatctcgatcagagctcgggcaaccttttcggctgcgtcgtcccacgatacgcgctcccaatcgtttccgggctttgcacccacgcgaaccatggggtacttaagcctgttcggatggtacagggcctggatgcccgcaaggccctttgggcagatccttccctcggtcagaacgtcgatgggatctcctttgagctcgacaacgcgcccgttgcgcacggtcgcgataattccgcagttgttgatgcaggcgcgacaacaggtatggatctcctccacctcgtcttcggcccatgccctctgcgtttcaaccatgttgttcactgtaagaccgcttgcagcagcgacgcccgcaagcgccgcgagcttcgtgaagccgcgtcttgttatgctatacgacatgcacaatcctcctttgtgctccctggttgcatttctccctctcgtctcatacgctcagcaaactgcctcccttcctccgttgtcgtccatgctttcttccaaaccaagccaccagccctctcgagctgcgacacaaaataatcggcctccaaaacgctcgcatcggaagcgatgcagagcgttttcctttcgcttttataggagcgttctatttgcgcgtacgattgcggcttgacgcatagttccagaaagaagaggaacgcctcgctgcgcaacggcttcgcgcgcagcagcgattcgagtcgaatcagggggtggaacgcttctgcggccaaagaccccgccgccgtagtgacgagcacctgctcttcgccgtcaatcaatccctgaggttctggggcggccgttgcttcgatgccgcccgcatcgactaaaaacccgatgagtgttctcggtgcctgaagaatctgcccgtacgtcatttccggttggcgggctataaaggcctcgacttcttcgaatcgacggggttcgccacagtgcaaaagcgtcctgtagagcatctcttggtgcttgcggttgcgctcgagagctgacgcgactcgggccgctccctcgcgagcggcatccgcttcgcgatcgcgatccaggccgttctcggcagtcccctcaacgctggcttggctatcgtgattcattcgtctcccttctctcaatccgcaccaaccataccgaggggcgaaacggatcgcatagagaggcgcggactaaacgttctcgctcgattagttcttttcgaactaatcccgtagaaccatgatcggttatgctttatgtcacgaggagataggtcgcttactggggggattatgaaaaacgtacttgggaagctttttgctcaatatcccagccttaactatgttgggcttgcgttgtggcttggatggtcggcagttgccttttcgcgggctttcgagttctacgatttcatttcggcgtcgaacgtattcggactcttcacttttatccagatcggatcgatcgtcgtcttcctgcttgctgcggttttgcccgagcaggtatcgtcacggcttctatccccttcggcgcttttcgcttcggcaggcgttgcgacgctctgcatcgtctcaaccatcgctttattcgagctggccgacgagggggcaatcggctccagctcctatgccgccatctacgcgatcgcaagcatcctgacgggagcgagccttgttcctctgttcctgaaatgcatcgttccgttttgttcccaagctcccaaacgcgcaaccctgcgattcgcgcaaacgcttttccagtccggcttgtactatttcctcgtcgtcggatccccgcgcattttctctctcgtcctattctgcttgacgccgttgcttatcgtcatcctgcaaataccaacgagaagcagcacggcaaagccttcagctaaatctacctcccaattcaaccgccccttcatcggtctgtttgtcgctatgaccatctacgcaatagccatgaggatattcgagccctacgtcgcctccgtgcttccaagggattcgagtatgttcgtatcgtccttctcgatctgccttttgctcatagtgacgatcgccctcgtctgcgcagttgtcaccgttaaaggagccttccctttcgggcggatataccacttggcgatcgcattgcttctggtaaccgtcttgtcgccgtcggtattcaactcgtcgcctgtgatgctcagcatcctttgcctcgccattgttcatttccttaccatgctataccgttgcattcttgcctatatcgttttccaatctggcatgaacccaatgaagcttttcggattcggcatggcggcgatatcgctaggaagtctcatcggcaacgtagcgggtgcgttgctcattcgcgtcgcctcggagcttgagcttctttaccttctgtctttcgcaatggtctttctttgcatcattgctgcgtttttgattttccccgaatcgaagatgaaggcgctgctactccccgttgacgaacccgccctcgatgcccttgaaaacaaagagcgccctgtaaaatggtggatggaggcggccgagcgagccgcccggcaaggacggctttccgaaagagagaaagaggtctttttcttgctggttcgcggtaaaagcacgcaacagatcgccgacaagctttttctctcgccttataccgtgaaggcgcatacgcgaaacatctacgccaaactcgacatccattctcgcaacgagttaaacgactacgtcgacaagcagataaacgccagccaaccattgccctagcagtccctcgacaagggatcttagattagaggccttgcctgccttgcgaatacgcctcgagaagcgcacgctcgaattcaattacaggcatgcctcggggggattaagagtctgcggatattgttaatccatggtccgagttgttgctggattggttttacctgcaagaagctgatcgaagcgggctatcgtatggcgcaaaatgcaacgcttttctatttgatcttgaagccgttgcgtgcagctcgcctgggatcgagcgcagggtgcttctcgtagtagttttgtttctgcttatacattcgccgatccgcacaggaaacggcataatcgacaaggcaaggttccacggcatagaaaagtcccgcggcaacaggacaggagcgttcgtccaggcgctcgcacgcatcgcgcgcctgccgcatgaaggccgattcgcttgtacttgagtttatcgccaagaactcgtccccgccgaggcgataaaccgatgacccatcgaaggcgcttctgagcacgtctgcaaccatcgaaagcatcgagtccccctgtgcatgcccttcgctgtcgtttacctccttcaaaccgttcaggtcgaggtaagccacgccaaatccctttcgcggcccctgcgcgtccaacgtctccatgtcggcgatgaaccggttgcggtttttcaaacctgtgagcgaatcagtgaagctcatgaccttgagccgatctttcagtgcataatagccgcctaggttctcgttgtagcgagtccatgcgtaataagaatcccgcttcaagaggttattcgtgcaaaactcgcagggggcatcgacgcccgtgatcgcttcgtagcattttcgtccttcgtaaggccctccgataagccgacgcacggcgtcgttggcgtacagcatgtcgtacgtttcgatgtcggaaagggaatctcgatgccgaatgcccgttcgcaccgagcggcgccatggtatgcttgtttcgtcgttatccgtcgaaggagtgaagatgaaaatgctcggaatggggattcctgaaataattatcgtgcttgcactgtacgccttggtgatcttcgtcttctacctgatcgtaaagaaagcggtcaaaaacggcgtgatcgaagcgcacaaccaaatcgagatgagcaaagggaagtcgccaagcgaacggtaaacacgcacgagaagagcctctgccgcgcattcagagcagtctgccatcctccgacgaggcggtgtcggtgagcggatcggcatggggaaaagaggaaatccaaagaatttcacctcttccccatttcttcaattatcatgcattaggaagcatttgccataacgactttggagtgtctcatggagatggtagaacccgttgcaagcatcgatgaataccttgaaagcacggcttacgtgggaagcagatcggatgccatcatccaaaaggcgcaggagctctgcaagggactcgtaagcgagccggagaaggttgccgcctgcttcgcttacgtccgagacgacgtggctcatacggtcgatatcggcgaaagcaccgtcatcagaacggccgaagacgcgctcttccaagagcatggcacgtgttacacgaaaggcatgctcttggttgccctgctcaggagcttggagatccctgccggtttctgctatcagcggcttttcgagaactctgacgacgatccgcatttctttctccatggattgacggcttattactcggcagaccaaaactcgtggataaggctcgatccccgtggcggctcgaaggacgtcgatgcgccgcgggttgatgcggatcttgtttcccgcgattaccttgtctttcgcatagacgaatcgattggcgaagtggattatcttaccgtgcttcctcgtcatcccgatcaggtgcttgcgattctcgaggtaagcagcaactgcataagaatgatagagcaggaccttcccactatgctcgacacctcggcgtagacagcgtcgaatcgccatcgccaatgcatgctcaagcgcgctggccccaaccgagcatctctgcgggtttgattcggtacagaaccgttagctcgtgcatggcgcgcgtgatggcaacgtagagcaggctgcgctcgtattcgctttcgtattgaccggcatctgcgtcaagtatgacaacctcgtcgaactcaaggcccttcgccatttttaccgaagcgatggttgcgccgtcggaaaacgttgcgctctcgtcagagatcaggtgaacgcgatgatcctgcgagagaagctcgtagtagacgcgagcaatcttgtccgatttgtggatgatgccaagcgttttcgaatcgcccttctcgaacttctcgatgatgcgaccgatctgggcaagaaccccctgcgtatcgccgcagcgttcgaagcggaccgcctttccgtgccgtttcatcgccacaagctcggagaccggcctcacccgcagagcgagctcgttgatctcgagcgtcgagcggtagctttgcttgaggtgaaacacccgagaagcaccgtacagtgtcgccatcgcggcgagcgtcatgccgttgacgggatcgaccatctggttgaaatcaccgaggatggttttctcgcagggaaacaaacgtgcaatgagcagatgctggatgggcgtcatgtcctgcatctcgtcgataagcagatgcctgtaatcggcaagctcttcgaacccgtcgaatgccgattgcagaaaggcaagcgggcaggcgtcctcccattccaccacgcctttctttggcatgtggagcatatgcttccttccgcgttccgcaaagaatcttctgtacagccccaacgcatccttcgccgcgagcatggcggtgagcttctgcctcacttcgaagcgcttcggttgagcggtcctgctgccgatgcttcgtgcggcaagatcgctcagcacctcgcctgccagaagatcgatgcgctcccgtatcgcaagcctgccgtagcttcgataacgttcggtcagccagtcgcccttgaaagtgcgtgttccgaacgaaaggtctttccccgaaaacacttcgaaccgggcatcctcggcgtacgcccgaagcgattctgcaaattcaagcgttcccttgtactgcgcccttgcgagccaagcatcatccgcatcgtcgacgggatagcgctgcgcctcgatttccacacttgaaccgatggccgatgcggcgatggaagcgaggcccagctcgcagatgggctcttccccaagttcgggcaacacgctcgatatgtagtctccgaacactttgttcggggaaagaatcgctaccgatttcgaggacagcgtcccctttcgacggtagagcagatacgcgatcctatgcagtgcgatggaggtttttcccgatcccgcgacaccttggatgatcagcgtttcgccggtctcgtcccggatgatctcgttctgctcccgctggattgacgatatgatggatcgcatcttgctgtcggaggttttgctgagctcgcgctgcatcacttcgtcgcgaataccagaggaatcgtcaaccgcgtacacaagtttgctgttttcaaccttgatctgccttttcgccttcagcataccgctcacggggccggaaggcgcatcgtagtgcgcgcgcccgatatcgaaatcgtagaagagtcccgcaaccggcgaacgccaatcagatacctcgatcgaaccgttatggctgaaagcgaacttgcctatgtagctgattttcggctctgtctcgccttcgggggcaaacgctacccgcgcgaaatagggagactcgtagagctgcgcgagacgatcgcgcgaaaggcaggcggcctcggcgttgcgatcgacctccttgaggtacagctcgttttgatacatttcctgcgggtcgatctctcccctgttctcggacatgtaaaacttcgtcgatcggtatgcgccgttggtccgctcgaacagctcggaagcgcgagagagatctgtcgacactttttcgagcgtgctttcaagatgctcctcttcctcacggaaaacggtgttctgagcgcgcggctgtggatccggatcggcaccggaccgctggtgttcgttcatgggtgctcctcgggtccgcaaggatcggcggccgcgtttttcgcgtcgggcgtcgtgcggataggcttggataaatggatgggttatcatagcagagagataccgactgggcaagaagcgtttggaaaatcccctcattcggaatgcagctttttgtcgacccagataggcggcatgtgcgttccggacaacgaatgcgtctctaaatgataccgattcgattccagatttcggaacccgcgccgtgctgctttaaactgaagatcggagctgttgcgcgaaaggaacaccatgtcgaagtcaaggttggaggcgtttaccgatgccgtcatcgccatcgtgatgaccatcctcgttttggagctgcatgagccgacagcaggaagctttgccgctttgttcgaagaatggcatcgccttgtaatctatgtcgtgagcttcctcatgctggccatatactggaacaaccatcatcacatgttccaggcggcgaaagccattaatggaaaagtgctgtgggctaacaacctcttcatactaagcctgtccgtcttcccgttcgtcacttcgtggatgggcgattatttttcggatctggcgccgcagctttcgtttggcattgcgatcatgatggccgacgtaatgttttttgcggttgccttcaacctcaagaaggcaaccgacgacaacgagaccgtttcgatattcttcaacaaatactacaaatcatggatatcgatcggggtcaacgtcatcgcactcctgcttggcatgctgatcaggcccgagttgatattcattctcaatgcgctcatgctcgccctttgggtggttcccgaacggcgcatcgaacgggttttccaacagcatcgataacgcagcatccgtcttccagtctgccgccgcgtcattcgcctcgatgcttcattacattggcgtatttctcagggttcttgcgaaagcgggcgagcacgtaaggacacatcggcacgatggtcgcaccggttttctcggcatattcgacaagggcgtctaccagggaagaggcgattcccttgccctcgtgttgcggacgtacttcggtatgcgtagcgtagagctcgtttccttcggctcgaatgtattcgagcaacccgagctgcttgccctcgtcgttcttcgcaagaaaccgggaggcttcctcatcatgctctatcttcatggggatcctttccgaaaacgggattcggttcgcttagcgcattcagccgcgcaggtaatggtaaagaccggtacagccggcaaccacatcgtcgtaggtggccccgaaatcgccggtataccatggatcggcgatatcgcccgtttcccccgcgaattcgagaagcttctttatcttgctatcgggatcaccgccgaacatccggcgcatgccctttacgttcgcctcgtccatgccgatgagaagatcccatgcggcgtagtcggtgctgcgcagtctccgcgcgaacttcccctcgcacgagatccccgccttcgaaagcatatcgaccgttcccggatgcacggggttgccggtttcctcgtcgcttgtagccgctgatgcgatatcgaaaaacgcgccctcccgatggcgatccgcaatgtctttcataacgaactcggccatgggagatcggcagatgttgccgtggcatacgaacaggattcgaatggggctcacgacgtcacctgcgcttcatcccgaacgacaggttccatgacctcccgatatcgttcatagagttcgggggcgaccttttttatgctcttgggccgaaacgtcttcgcatcgacaacgcagtgggtgctcgtggccgtgcagcacggtttgtcgatgcctatttcctgcccttgcttgtagacctcgtatgcatagaccgtcttggtcggccttgattcgatgacgcgcgttttcacgatggccgtatcgccataggtgagtggggctccgtacgagacgtcgacgttgaccacaggcgagaggtatccggcctcctcgagccgtgcgtaggggtatccgatggtctcgagaaaatcagttcgggcgtcttcgaaatacagaaggtagttcgcatggtagacgatgcccatcatatcggtttctccatagcgaacatgtatggttgtggttgcctgcatatgctctttcttcttccgatcggctacaatggcgctatgggcaatatcgtaacgtatatgcagaaagagcagcgcactttctcggaattaccgtttcaggcggtagacagtctcgtgtgctcggttatctgctacttcaatttcgaccgatcctttccacccgtggcatcgaacggggctaaaacccgcttgcacgacatcgttgcgctaagcgactggagcaccctttgcgcagccagctggctcgaagacgcaaaggaaacgaaggacttcatgcaggctctgatggccagcaggcgctatcgggacatgtcggttgcgttttatgcaaacgaattctccaacgttgtcgagaagcagttcagcgcaacaaccctttttctcggacaaggcgcagcctaccttgcgtttcgaggcaccgatgggagctttgcgggttggaaggaggatttcaacctctgcttcaagcgcgtgataccttcgcaaagatccgcggaagcgtacctttcgggcgtcgcctccgccaccgagggaccgcttgtgatcggcggccattcaaagggaggtaaccttgccgaatacgcggcgctcgtctgccccgaagaggtctacgcgcgcgtggcagccgtatacaaccacgacggcccctcgtttttagacaatccctccccaaggatagacgaagcttcgttcgacgagaaactcgataagaccgtacccgaatcgtctgcattcgggatgatcctcgagcgcagaagcggctaccgagtcgttcgctcatctgctctttcggtttttcagcacaaccccttcagctgggaagtcgaaaacggcgatttcgcatgccaagagacgctcaacaaaagcgcggtgtttttcgatgcggcgctcgatgaatggctgagaagcaagagtgcagaagagcgcgagcgcttcatcgatacgatttacgagctgttcgtttcaaccgaagcatcgagctgggcggaattccaaagcaagctgcttgctaatacgaaaaagatcgtcgggaaaggcggaaggctcgaccccgaaacgagaaagttcatcctttcgaccatcgcttcgctcgggggcatcctcaagcgcgaaacgataaaaagatttcgcccttcgcctttgacgtggcgacctttgagaaaagaacggtacaatacctcttcgaacaatcggaaccaaagctaggcaaggcggataaacgtggagcacgcgacaaaaacctcgaaactcggcgagacggcaacggagtacgctcggttgaccccgaccatggccatgcagctggcggcaccccacacatggcccgccgccatcctccccgtcctgttcgccacctcccttgcaggtatttggcatggagacgtttcgatcactttggttctggcgctgcttgccatctgcatcctcatgcaggcatcggtcaacacgctcaacgattattacgacttcgtcaaaggagccgacagcatcgaaaaccagctcgaccccaccgatgccgtgcttgtctacaacaacgtcaaccctaaatcggccctgaagctggcgatcggctttctcgtgtttgccttcgcgctcggcgtgtacgttatcgctgttgcgggctggataccgcttgcgctcgggctcgtcggcgcgggcatcatcgtgctgtactctgcagggaaaagccccttgtcgtatcttccggtcggagaattcgtcagcggaatcaccatgggcggcctcattccgctcgcctgctaccaagcgctcaccggcacgctctcatggatcgttttcctgctctccgttccgttgatatgcggcatcgggctcatcatgttcaccaacaacacctgcgatatagaaaaggacatcgaagcagaacgcaaaacgctttccgttctgctcggacgcgaccgcgcacgcaaagcctaccatggtgtgatcatcgtttggatggcgagcatcatcgtgttctcggcgttgttcttcccctcggggctcgttgtcgcccctttcatgctcatcgcactctaccccgccgtaagcgcgctcttcaagaaccctctcacgcccgcaacgaggctccaggcgatgccgcaatgcctgaacctcaacatcgccctgggcgcgttctacgcggcggctatcctcatgggtggagtcgctcgcatcgcgctgtagctattcccaccgaatctgcacgggatcggccaatcttgcacggtattcggccaggtcgaactgtgcgagaagatcttcgggctctgccgggtcgtcgcatcgtgcgattcccgtaagccccgcaatatgcccgataatggccgcaggcgttttgaacctgcagataagcgattcgatggatgcatcgcggtcgcgcttcgagagccgacgattcgactcggctaccaaaagcgggatatgcgcgtaggcgggatggtcgaatccgagaagatcctgcaggtagagctgttgcggcgtggagcagagcaaatcgacgccgcgcacgaccgaagtgatgccctgctccgcatcgtcgataacgaccgcaagctgatacgcatgggctccgtcggatcggcggacgaggaaatcaccgcacccctcagccaggttctgacggtagatcccctgcactgcgtcggcgacctcgtatgtttcagggggcactgcgagtcgcgtagccggattgcgaacctgggcgcgcttctcgcgttcttccgccgtcagatggcggcaggtgcccgcatacacggccttttctccgcgatggggcgccgaggatgcatggagatccgcacgcgtgcagaagcaaggatacagaagcccgcgcgattcgagatcgcggcaggcttcctcgtaaacatccctgcgatcgctctgataatacggtcctcgatcccacgtcaggccgagatactcgaaatccctcatgatggcttcgatgtactcgggcttcgagcgctccgcgtcaaggtcctctatgcgcaagacgacatctcccccgccctgtttggcaacgagccatgccatgagcgcggcatatatgtttcctgcatgcatccgccctgtcgggctcggtgcgaatcggcccgtcagcataccctacagcttcgcccgcctgtcttcgacgtgcttcgtcttcccgaagctcctctcgataccgccgggctcgacgagcttaacggttacgccgacgagcagaacggccttgatccgttccgcaatgcgcttggtgaacgcgctcatctcctcgaatgaatcgctgaaggccgacggcttgagttcgaccatgaccgtcatgcggtcaaggcctccttcggtatcgaccacgatgcgataatgggtcgttacaccctcgatgcccgcaagcacgtcttcgacctggctcgggaacacgttggtgccccggatgatgagcatgtcgtctgagcgcacgcgcaccttctgcatgcgggcatgcgtgcggccgcatgcgcaaggctcgcatatcacgcgcgtcaggtcgtgcgtgcggtaacgcagtacgggaatcgcctgtttgtcgagcggcgtcaaaacaagctcgccttcgcagccgtcgggcaccggttcgccggtttcgggatcgacgacttcccaaaggaagtggtcctcggcgatatgctgcatgtcgcgcgacgcaagacattcgcccgaaacgccgggccccatgacctcggtgaggccgtagttgtcggtgcacacgatgtgcatgcgcgattcgatttcctctttgagcttcggggggcacggctctccgccgaacaggcccacgcgcagcgtacttgcctcccagtcgaagccgagcccctctcccacctcgcacatatgcatggcatacgaaggcgtggcgatgagcaccgtggttccgtaatcctcgatcatggtgagatgccgctcggtattgcccgaaccggcaggaatcagcatgcatccgagtttttgcagtccgtagtgcaggccgaatccgcctgtgaacatgccgtagccgaaggccatctgcgcgcggtcgcccggcacaacgccggccatttgggccaatcgggcgatgcaatcgctccatacgtccatatcatgggtgttgtagccgactacgatgggtttgccggttgtacccgaagaggagtgaagctcgatgacctcgtcaaggggcacggcgaacaagccgtatggaaacgtttcgcgcagaaccgccttatcggtgaagggaagcagcctcacatcttcgagcgtcttgatgtcgctgggctttacgccgcgctcgtcgagcttgtcgcgataccaagtgactctctcgtaggtccatgtcacctggtccttcagcttcgccagctgtatctcgcgaatacgctcccgtgaagctgtctcgatatcgcgatcgaagataggcatggacgaaaaatctaacatgcgcaatcacctccgacgggctttcgcagatcgtcttgggtgataagctcgatcggctggtcggcaagcagcttttcggccacggcgatgtccttgacgctgagcgcgatgtaggtcgatatgagcgaatagctgtatatgacgttgatctcgcattccgccatgaccccgatgagccgtgcaagctcaccgggcttgtcggcaagcttcgcgcagagcacctctgccgtcgtcgccgccgtacccgacttctcaagtgcggcgagcgcccgttcggggtcgtcgacgatgaagcggacgatgccgtaatcgccggtgtcggaagcgctgtaaccccggacgctgatgttctcatcttcgaacatctcgagcacgcgcttgagatgccccggctggctttcaaggaaaacgctgatctgcgaaacgctcatgccctcaccccttgcgcagcagccacccccgcgcgaaacgcttcgatgttgacgtcgacggttttaggcggaacgcgcttggcaatctgctcttcccacaacgataggtcgaatcccatgcccgaggccaaggcgccgagcagcacgacgttggttgatttcgagctgcccgccccgcttgcgatggtgcctgcgggcaccagaacggcaccgagctcggaaagccgctcacgcgcattttcaggcatggatgcagagcccgtgagcacaggcaggggcttgatcgactcgtcgttcacgagcagcatgccgccttccttcaagtacggtgcgttgcgcagagcttcggtcgtctcgaatgcgatgatgtaatccgcgcagccgagatcggtcaccatggaagacacgtcctcgccgaaccgcacgaccgtcgtcacggcgcctccgcgctgggacatgccatgaacttccgaaagcttcaccttgcacccggctgcaatggccgttttcgccaaaagatcggcggcgaggatggttccctgtcctccaacgccgcagagcaataccgtggttgtttctgctttacaagcggacactggactctcctttcaccgcatcggcagtcgaaacgattgccgagaacgcacagtactgcgcacactgcccgcagcctatgcacatcgtgtcatcgatgctcgcgcgtcccgtttcgggctctttggaaatggccgggcatccgagcgtcgggcagacgccgcacgcgcggcaatcgtcggtcacctcgaaagcgggcttgcgtgcacgatcgacgagaacgcaaggcgccctgaacacgatgacggaaagcccgtccgagccggtcgcggctttgagtgcagatcgcaccgccttcatgtcatggggattgaccgttgcaatatcctcgatgccgagggcggcgataatgccttctaaatcgagctcgcgggtcggtcgtttttgcagcgtgatcccgttgaaggggttgccctgctgaccggtcatggccgtcgtgcgattgtcaaggatgcaaaccgttcccgagccttggttgtacaccgtgttgagcagcgagctcaaccccgaatggccgaacgtcgaatcacctatcacggcaaccacggggcgatgttcggtttcggcaagggcgagctcgaacccgtgcgccattgagatggatgcgcccatatcgacgcaggtatccatcgcggagagaggcggcagggccccgagggtgtagcagccgatatctcccgttacaatggcgcggatgcgcgtgagctccttgaacacgagcctgtgcggacatccggcgcaaagcgccggcggacgcccggggatgtcgctttgctgggtaacatgcggtgcctcctgcgcgccgaacgctgcgccgaccaagctcggcgtcagctcgccgtcgaggggaagcgcttttccgggaacctgatcgatcgcgattccgaacgatttgatctgagtcgaaaggtaatcggaagcctcctcgaccacatagagggcatcgacggtgcctgcaaaatctttgagcgcctgttcgggaagcggccaggtaatgccgagcttgaaaatgctcgcttcgggcatcgcttccgcaacgtgctggtatgctgcgcccgaacacacgatgccgatttccgaggagccgcgtgaaattatgttgtacgggcaatcctcgacccactccttcaatgccgcaacgcgcgcatcctgcaccttcctgcgcggtctggcgaatgcgggcatcatgacccacttgcccgcatccttttcatagggaacaagccggtgctcggcacgtgatcccgtttcgacgggcgtcttcgtgtgggagatgcgcacggtcgatcggatgaggaacggcacgtcgaagcgctcggaaaggtcgtaggcttcgcgcgtaaaggcaagcgcctcggcagaatcggatggctcgagcatcgggatgcgcgcggcgagggcatagaaccgcgagtcctgctcgttttgggacgaatgcatgcccggatcatcggcggccaagatgacgaggccgcccccaacgccggtgtaggcggccgtgaaaagcgggtcggcagcgacgttgacccccacatgcttcatggtcgcaagcacgcgcgcgcctgctgcggatgcgccgattcccacttcgagcgccactttctcgtttgggcaccattcggcatacacgccgtccttctcggcgaaggattccatggtttcggttgagggggtcccggggtatgcgacgccgatcgatacgcccgcctcccacgctccctgggctatcgcctcgttgccggaaagcagttccattgtgcgatcctccatcttcgccgccctgcgctgtcggcgggcggcttctcgtctaactggctttaaacttcggggctttcctgatacagcaggcagaagaccccgatctgaatgatgtcgccatcgtgaagcaacgacgaatcaacgttcttgttgttgatccagaccccgttgtacgaattggagtcggagatgcgatagctttttccatcgggaacgatcgacgcatgctcgcgggataccgtcatatcgttgaggaatatgtcgcagtgcgggctcctgcccacgcagacctcatcggtgccgagcttgaagaccgtttcgatctgagggcctctgaccacccgaagaatggcatcggcgggtgtctcgatcgccgcgggaacaacctcgccgccgacgaattccagcggcttgaagctctgcgtcgaaccgagcagtttgaaaccgcacatggggcaagccccagccccctcgggcagtgggctgttgcagatcgggcagttttcgctcatagctttacctcgttcgtatcgttgctcgcctaggctgaaagcttaggcgttcgctttatctatgacaagcggcgtctcgttgtacagcacgttttctgcgaccgaaggctgtcccgagaatcccctgaacaggcgatcccaccaaaccccgatgccctcgagcaggtcgggcgcgtcaacatcctcggcggcgatcagatcaactgtcgccatgacgttgttgcgctgcttgaacgtcagcgtgccgatcttatctcccgcatgaacgtttccctcgagttcttcgtactcgaccgactggctgatgttcccgttcagatcgaaaatgtcgatgacctgatcgggatccgccaccgtcgccttcaccgtgcggtcgatccatccggtatgggcgacttcggcaagaaccggaacctcgtcggaagagccccccgcgttcgaagatgcggtttgcgaggtgttcaccagccggtattcggtagtatgatcaaaaacccaatcgagcagcgtctgcgcatcggtgaaacgctgtgcttccgacgtggaatggatgacgatggcgtacatctccacgccgttgcggttcgcagcgccggcgaacgacggtccggcaagcgccgtgaaaccggtcttgatgccgcaagcaccttcgaagccgtttttcagcatctcgtcggtgctttcgagatacaggctcgctttggttccgtcggctctcgtcacctcgatggtttcgttcggagttgcgacgatggtgcgaaacacctcgtttttcatcgcagcctgggccatgatggcgacatcggcggcgcagctgtgctgatcgccctgccatatgccgtcgtcgagtccatggggattttcgaacaccgtatcggtgcacccgagttctgccgcccgcccgttcatgcgttcgagaaacacggcttcggcttcggtctcggagagccccgaagcatccccgccgccctgctcgtacagaaggcggcccacgttctccgctatggcgatggccgcatcgttgcccgatgacaaaaggagcgccttgagcgcgatctcgagagtcatggtatcgtcttcgagcagagaagcgctcgactcgccgaccgttgccgcacgcgagctcgttgtgatgagggtatcgagaggagcgctctcaagcgcgacgagcgccgtcatgatcttggtgatggaagcgatctgcgtaggagaatccgcatttctctcgaagtaaaccgttccctcggaatccatgacgagcgcgtattcggcatcgatgctcgggcactgcgcaaccgacagaccgcgcgaatcgacggtaagcccgtacacgacgtccgcttttctgacgtcggcgtatgcgggcggtacggcaagaccgaagccgagagccaatacaagtacgcaagccatgaggctcgcgtaccaggaaaacgccctttgtttggcggatgtcttaatcaacgtgataaatttcctccggtgccacgggctcgaagcccgcttccttcaatgcgtcctcaatactatggtcgctcaccttgagcacgtcaatggcgtactctcggttaacggaaaaacaatagccgtactctatgttcacgtcatgttcgttgaagaattcaagcaggccggccaacccgcccggctcgttgggaacgcgcacgccgagcacgggggtgagcgtagcgcggtaccccgcagccttcagcgcttcggcggcagcctccggcgtatcgcagaagatgcgggcaacgccgaaatcggcagtgtcggcaaggaaaagggcgctcatgttgatgccttcgtcggcgatcgtgcggcaggcgcttgccaggcgtcccttctcgttttccaggaagaccgtcagttgtgaaatcatgctcgcgtcccttctctcaggtcaacaatgcgcttcgctttcccttcgctgcgctcgatcgtcttcggctccacgatcttgatgtcgacggcgatctgcagattgctcttgagctcggtggccagacgcgccttgagctcctcgagcttgcgaatctcgtcgaacgggaaatcgggaacggtttcaacgtcgagttcgacgcgatcgagcggccctttgttcgtgaggatgatctggtattgtgcggcgatctcggggaatccgacgatgacctgctcgatctgcgaggggaacacgttgacgccgcggatgatgagcatgtcgtcggtgcggcccacgatgcgatcgatcttgcgatgcgtgcgcccgcagctgcattcttcggcgatgatgcgggtgacgtcgcgggtccggtagcgcacaagcgggcagcactcgcgggtgagcgtggtgaacacgagctccccccattccccatcgggaagaggcttcagggtttcgggatcgacgatttcggcgtaaaactgatcttcggcgacatggagcccgttcgccgcggcgcattccatcgcaacgcccggtcccatgacctcggacaaaccgtacacatcgcagtactgcacgccgagcttctcacggatatcctggcgcatgctctcggatgccggctcggcacccaaaatgacgcccgacaccttgaaatccttcgcgggatcgtatcccatttcaatggcggtatcggcaatgagcagcgcataggagggcgtgcaggccaggatgtcggttccaaggtctttcatcatctggatctggcgcttggtattgcccgatgacgtggggatgaccgagcagcccacggcctcgccgcccgcatgggcgcccaatccgccggtgaacaggccgtagccgtaagagacctgtatggtcgagttctcgctgccgcccaccatgtagatgccgcgggcgaagcaatcgccccagttcttcaaatcgttcgcggtgtgcccgacaaccgtcgcctgaccggtcgttccgctcgacgcatggatgcgcgcaacgtccttctgcggcacggcgaacaggccgaacggatacgcgtcgcgcatgtcctgcttgacgacgaagggaaagccggccagatcgtcaagcgttttgaggtcgccgggctcgacgcccgcttcctggaaagatgcgcggtagaagtcgacgttctcgtacgcgtgtcgcactgaccactgcatccgctcaagctgaagctgccggagctgctccaccggcatggtttcgatatctggctggaaatacactgaagctaccttctttcgttctattcgcccgtttgagcaccgttctcgtttcggctttcggattccgattccttgaccggaggcccttcgaccttcacttcgtttaaggggtcgtacgtcgaggagaaaagatcctcatgaagtattgtgccatttttatccttgaccgtacgcacaatcgatatctttcttccgtctgacccgacggttttcacataactggtcccaggagcgaggttctcatcgaccgtcgtcttggttttgtacttctcgccttcttgccactccccaacctgcgtgctcacctgatattcgggattgacgccgtacaatgtggcggttacggtcgtatcggtatagctcatatcgagcaaaacatcggatgcgctgtcgttttcccaaaccaggttgaggtcgggatatgcgacggctgcatcgcgaccgacggggtagcttgcgatgtagagcgagtggttatgacgcgtgacaaccggaaatcccgattcgtagaccgcattgaacacggtcgtagccacctggcagattcccccgccgatcgcgtcgacgaattctccgtcgagaatggcacccgcaccttggaaacccgcttcctcgttgtaatcgcccgatatgtcgttgaacgaccatcttcctcccccggcttcgatgatcgagttgttgagcagatcggcgcctagatggatgttgtgctggcgcgatacgggctggatggtgtattcggtggtgaacgatgcaatcgagctgataatgccgttttcgagcgcctcgtcgaacgtcatcgtatcgggcacgcgcttcgaagcgacctcgaccagaggagcggagcccgaaggaccttcctttgatccgaagagcacggattcaagctgggagacggcatcgccggcaacgggtatggtctcgtcggtttcggtatgcacgatcctctcgccatccttcacctcgaatctgacctggatcgaatcgccttcgaaggagctgttgaggtggttgatcacgatgcccttcgcgatgtcttgatcaaggtacggctcgagcgaaaaaccgccatccgtttcgacgatgcgcgttttcacccagttgccgatatcggttgccgaagccgcccacgtcgtgccctcgaacgaaaactcggcgcccgacgatagggccgcattcacgagatcgcacgtgcgctgggcctcttcccgtgtaatctggatgggagcatattctgtttcggcgacgaaatacgggcgggcgttgtcttcggtgaggaacgcatcgctgatctcggccgcgaattttcgtcgctcgaccatatcgccgtcatgtccttcggtcacctgcgctatgccgtctgcaaccgcaatgtcgaagttgacgcgcggatcgcctattgccgcatcgacttcggcggcaaggctttcgagggcatcttcgtcgaagtcgacggcgggctttatgtcgtagccgaatgcaagcgcctgaatacgggcgggaatcccaccgtcctcgcgaccataggctaaggcctgttcgacaagcgccgcggtatcgaaagacgccgcaaggctttcttggtcggccgtccagagaaccttgttcgccttcgcctcctcaaccgactgctgctcggccaaggcgttgttctggttctgctcgagaacggattcaatgttcttgctcgcatcttcattggcaaagacgagcacttctttcccctcgaggcgcacggcgtattcgccctctatgagcgcctgagcctcatcggcggtcttccccccgagatcaagggaaccgacgtggacgccaggatatatctttccccagttcataccgaggtcgatcgccgcggcgcccccgatgatcacaagtgcggccacggctgcgacggcaagcttgcttcgactgatcgctctggccagaaaaccgaagaagcgaccgatggcaacgagcacggcgccgatcccgaacagccccgccttcagcgcggcgccgaatcccgaatcacgtgcgcccctcgtcggctccttggtccacagcgtcgtctggccaagagggttttgccgagcgcccgcagccttcggcggcgctttgcgagcatggctcgaaccggcttggcgcacaggcgttgcaggcgcacggttgcctttcgcctcagccgcacgacgcgcatgcgaggccgagcccttccgaaccgtaggtttctttcgttccggtttcccgggatatgtgcttcgatcggctcccacgggctacgaggattccttgcttcgagccgccttcagctccttgagcgcggcggctatgtagtagcccgtcgtgatgatgccgagaacgagacccgcatacacgaaccatatgccccacgagacgtccaccccgttaaaaccgggcagccaggaaacgtctatcacgttaaggcccgcgataagcggccagttgagcaaaagcccggcgaagccgacgaacagcagcgtcgtagtgaccttccccgcatagatgactgcaacgcgaatgcggtatttgctgagaaggatcgcgccgcccacaagaagcaggccgtcgcgcaacagcacgacgacgatgatccaaaggggaagcctgccgaccagaagcaggccgagaacgccggatatcatcagcaagcggtccacagcgggatcgagcagctgcccgagcttcgaaacggtgtgggtgcgccgcgcgatctgcccgtcgatccaatcggttcccgcggctagggcgaatatgaaggttgccaaaatatcgtagccctcgatcagaagaacgaggaacacgggaatcatgcacaggcggattgcggaaatgacgttcggtaccgtcaggatcttgttggaaaccggctcttccgccgctgcggcgcgctgttcccgcttgtctgttgccttcgacattcctcttcttccttaaacaaaaaaccgggcccgcatttcacgagcccggttcgatgacggatgtggtttacgtcccgatggattccatcggatgctcgtgcagccttcgctcacagccgtctattctatcaggtttccgagattactcggcttccttcgcgtcatttctaccatctgttgccatttctttggaaacgacgtcgatcgattttttcgttgcgggaggcgcataggccggatccatgctcaagcagtgcttggggcactcgcgaacgcagcttccgcactgcacgcagcggaagcggtcgatcgaccaggtgccagccggtttgtcaacgacgagcgcgccagtcgggcatcgcttcatgcatatgccgcacaggatgcacgcgtcgatgtcgttgacaatgtgccccttgagccctggaggcgcatagcgcgtctgcgccgggtattggatggtctcaggtttcttgaaaatcgatccgagcgtcattttgcccagtttgaagcttcccatggccccttacctttccgtgcagctgatgcaaggatcgatcgtcagcacgatcatgttcacatcagcgagatcgcatcctgcaagagcggttgtcataccggcgaggttctgggaggtgggcgttctcatgcgcatgcgctcgagatacttggtcccgttgccgcgcgcgtagtagtagcattcgccgcgcggttgctcgaccacgttggccgcttccgcccctgctgcaggcgaccccttgaccggcacgtcgatatcgccggcgggaatcttcgcgatcatctcttcgatgatgtcgatcgactggagcacctcgagagcacgaaccttgacgcgggcgtagcaatcgccttgcgtatcgaggatcggctggaagtcggatagatcgccgtagcctccgttgccgatcgagcgcacgtcgttgttgacgttcgaagcgcgggcgaacggcccgaccatgcacaggttgacggcatcctgctcgctgatgtagccgacgccgaccgtgcggttcttgaccgagctatctttcaggaacgcattgcagatctggcggtattcgtctttgatgccctcaagcgtcgacttcatgagttcgaactgggacggatcgatgtcgcgcaccacgccgcctactttgacgaccgagaagatgacgcggccgcccgtggtcgcctcgaacacgtcgagcacgcgctcgcgaagcctccagcaatgcatgaacagactctcgaatccgaacgcatcggccgcaaggcccatccacaagatgtgcgaatggatacgggaaagctcgtgccagatgacgcgcaggtactcggcgcgtttgggaatctcgacgcccatgaggcgctcgacggtctcggcgtagccgagcgagtggccgaacgcgcagatgccgcagatgcgttcggcaacgtagatgaactggttgtaatcgcgcgtctccacgagtttttcaagaccgcggtggatgaacccgatctgaggaatcgcctcgatgaccttctcgtcctcgacgaccaggtcgagatgaagcggctcgggcaacaccgggtgctggggcccgaagggaatgacggtcgcttttcccatgctactcaccttctttctgatcggcttcggcagatgcctcggctgcttctttcttcgccgcctcgcgagctgctttcgcctccatggcggccttgagcttcgccgctttctcgggatcgaggttggcgatcttgtcggcttttgcagcttctgctgcggcggcttccttcttggctttcgcctccatggcagcgcgaacctttgcggccttctcgggatccatgcccgcgagcttcgcttccatatcgtccgccgcactcgcaccgtcggccttggccgccttggctgctttcgccgcagcgagcttttccgctttctcgcgtgccgccttctgggcgggagagatgaccgtcatgggctctgcctgggccacatggtagaatttcccgccgaaatcgatggcgattccttcgatttcaaccccgaacagatcatgtgcttcgttctcgaacacgaatgcctcgaggaatatatcggtgatggacggcacctttgtgcccttcttcacgccttcgatcgtgaacatcttcagatctgcgccgagcatgtaggcgtactgcaggtcgatgccgttttcggtattgacggcgagcatctgcacgtagcggtagccgcgctctttcatgtcggccgcgcactgcttgacgttcgaaagctcaagcggaaggaactccgtttgcaaactcatgctcacgctcctttcttctgggcttcgagggccttcgccttctcgtcgaggatcccgagaccctggacgacggcgtcgatgatggcctcgggcctcaccgcgcaccccggcgcgtacacgtcgaccgggatcgccttgtccacgcccccgatgacgttgtagcaatcgtggaagatgccggccgaacatgcgcagatgccgcatgcgataacgaccttcggctcgaccatctggttgtatatctcttggacgacctttatgttctgctcgttcacgcttccggtgacgaggaagatgtcggcgtgcttcgggttgccggtgttgatgatgccgaagcgctcgacatcgtagccggggcacagcgccgcgagcacttcgatgtcgcagccgttgcagctcgacccgtcgtagtggatgacccacggcgatttcgttgcgtaagacatatgcataccccctttacagatacgcgaggacggctatgttgactccgcccgccacgagtgcgacgacccatgccgatttcagcatggcctgccacttgacgcgggcgaagttgttgtcgatccagatctcgaggaagtagatgaggacgacggccacgatcgcgattgcgaacgaaagcggattgccccagatgaagaacatgcccgtccacccgagaaacaagatgttctcacaccagtgcatgatctcgaccttggcgagcgtcggtccgctcatctcggtggtgatgcccttgacgagctcttgatgggcgtggtgcgaatacgacaggtcgaacggcgatttacgcagcttgatcgtcaagatgaacaggaatccgaggaacacgagccagatgttcgtgatgatcggagcgtcgagcgaaagcacgcctgccacatcgaaggtgccagccgccatgaagaacccgacggccatgaacagcaccataggctcgtaagccatgacctggagcgtttcgcgtcccgcaccgatctcggcgtagggagagcgcgtcgagtatgcggccacgatgaagaacagggccgacagcgtgatgacgaacacgctcatgagcaggttgccgccgctgaagaagatgccgcctgcaaggatcgtgaacacgagagcgcaggtgatgtagacgctctcagacgaattgacgcttacattctctttgccaagaagcttgcgcacgtcgtagtacggctggagcagaggaggccctaccctgccctgcatgcgtgcggagatgatgcgatcgacgcctgcaagcaggcagcccagcacgggggcgacgatggcgaaaacgattgtggctatgatgatggcgatgatgttcatgtctgccccctttctatagcaagcccggcaggccgacggcggcgaccgcgaaggccgcgacgatcaaaatggtgcacatgatcgtgccgacgggcgcaatgagcttctcgccgaataccgattccagataccagttgcgcgcagttgccttggtctcctgcgaaagcgagttttggaacgtgcgctcgctgttgtcgatgctcactcccgacaggtacacgtcgaccttgcgcgccttgctcttgccgaggccggcgaacagcacgatgacgatgaagatgacggccacgctcgctatccacaggttgtcggccgcaatgcccgctgcaacggttccgtagacgctgtacacgtacggctcgacgatcgcccacgagatcgcaggaatgcagatgcaacatgcgatgaccagaacggccatgagcgagatcgacacccattcgctgcgatgcacggttatctcgtcgttcttcggctcggcggcgatgcccgaaagcttaccgagccatttgccccagaacatgaacgttgcggcggagccgaacgcaagcaggatgatgagcgcgatgttgcccgtctcgacgaaggaaacgagcgtcgcccatttggcgatcagcatgccgaacggggcgatgaacatgcacatgatgccgagcatcatgaagcgagcgagacgcggcatgcgttcgaacagaaggtccatgtcctcgatgtcgcggctgccgatgtggtgctcagccgtgccgacgcacaaaaacagcagcgatttggcgatcgcgtggaacaaaacgaggaacgtcgcggcccaaaccgcctcaggcgtgccgacaccggcgcatgccacgatgaggccgaggttcgcaatggtcgaatacgcgagcacgcgcttggcgttgctctgggagatggccatgaacgagcacagcgtgaacgtgatgccgcccacgagcacgaccatgaggctcggcacgacggtcatgaagttgcccgagaacgatgcagtgcccgcatagaagatgggtgcgagcttgacgagcaggaagacgcctgccttcaccatggtggacgaatgcagcagcgcgcttgtgggggtcggggcgaccatggcgcccagaagccacgtatgaaacggcatctgcgccgctttcgtgatgcccgcgaaggcaaggcaggtaaccggaagcacgacgacggcggggttctggatgccgtacacgatgaaatcgacgaacgagagcgttcccaagccgatgaccatgaagtacaacgcgcccaaaaaaccgagcccgccgagtatgttcatgatgatctggcggaaggcgttcttgatggcctcgtcggtcttcgtgtagccgatgagcaagaacgagcagaccgtggtaacctcccaggccgcgaacagccacatcatgttgttcgagaacacgatgccgaacatggccgagagaaacaggaacatgagcgcaaaaaacgtcggcctgcggtcgggttcgtcggcgtggtgcgcctggaaatcctccatgtagccgatcgcgtacacgcagatgcccgatccgatgatgccgatgacgagcgccatcaaaagggaaagcgaatcgagataaaggccgtactggaccgtgacgtgatgcgcgaacccgaactcgagcacaagcgtgccgacgacttggatgatcgcaagcaccgaggcgagaacgtttctgtacttcacgccgtaggcgagtatgacgacggcgatcagaatgctgatgcccgtacatacgtagtcgatcaccggcgacatgtactcgaagtacacccccccggcaccgagataggttcccgctagcagcacggatgcgaggccgatgacaagggccgaaacgctgacaatcacttttctcgcttgattgttcttcacgacgaacaaaaccgccgcaacaaccagcgggaaaaggattagaaatccaagcatacccacgtggcttcccccttcgaataaagtgcattcttacagtaatggcggcacgagccgccgaataaactctagcaaagaaaggcctcctgcctgcccagcggctcaggcgtgggttttttattcggtcagcgggacgattcgcaaccaaacgagaaacgatcggtcgaatacggaaggcaggcggcagagcatcttttttcttctataaatcatactgatatgctaggattacaatatatcctgatgcaagattatttcagacgagaaaggatcaggaatgggaactgtgaaggctgtatgcgtaagcgaggcgaagggcgtgcagaagtccgacgtgggttcggctgccatcgaagccgatttcgggatcgtcggcgatgcccatgcgggcaaatggcatcgccaggtaagcctgctgtctttcgagagcatcgaggatttcaaggcccgcggcgccgaagtggtcgacggctcgttcggcgagaacctcatcatagagggcatcgacgtaaaggcactccccatcggcaccaagcttgcctgcaacgacgtgcgcatggagatcacgcagatcggaaaagagtgccgcagccactgcgcgatctatcatcgcatgggcgattgcatcatgccccgggaaggcgtgttcgcccgagtgctttcgggtggcacggtcagcaagggcgattcgatcgaggtttgcggcgaagactaaggcagcctccttcgcgttccctcttatgtttttgtcgatttcgtcgcacaaggctcgctctacgtgttgatatcatgtgcagcccacatctatttcgcattgcggagccgattcggtgcgtgaccccctagactcataggtgcggcatacagtcgctttattatcggcaacgcgttcaacatggttgcaagcgtcgccagcatttgccctgcggggtaggaagttaggttttacatgtctacaggtacagtcaagtggttcagctctgaaaaaggttacggcttcatctctcaggaaggcggcgaagatctcttcgtccacttcagcgaaatccagggagagggcttcaagaacctcgaagagcatgaccaggttgagttcgtcattgccaaaggctccaacggtaagaaccaggccactcaggttcgcgctctttaaataaaaaaacgcagtacaccttgaagcggcccgaaagggccgctttttcgtggggcggttcggtttgacgcacaaccgaaccgccccgctcttcttaaccgtgcaatgcgcttgctaagccgtgcgcctgccggtcagcaggttgattatggcgatcaggatgatcgatccgaccagcgctacgacgaacgaccagacgttgaagccggtgaagcccgatgcaccgaaaaagctcatgacgaatccgccgataagcgcaccgacgatgcccgtcacgatgtttttcaaaaggcctccctcggttttcatgatcatgtttccaatccagcccgccaggccgcctatgataatccaaactacgatgctcatggtcgtgctcctttcctctgttataggtgcttgggttcaccatagatgagcatccgagtaatccattcgggaaacgtcgatcgtgagcgcaccgtatacgctgcgtttccaaaggaaaccgagcggattgcgtttcgttaccgcaagcagggattcggaatcagcttgcgcttcgttctgaactgcttgcatgaacatgcaacgtgcagccaatcccctataatcaaggcatatgtcgaacgatcgctggatggagaccatgaacacgcctcccctcgaaacgaaccgcttgattctgcggaaattctcaataggcgatctgcctgcgatattcgatatcttcagcgacaaggaagccggcgagtatttgccatggtttcccctggagtcgatggagcaggcgcttgcgctgttcgaacgaaggcagccgaagaacctgctggttacgttcaggatgtatcagatgaatctcgatggcaacaacatgcgggttttcaggggatactgggatatgcatcccgttcacttcatcgaagaccttcagccggcttcatccgactgaaggccggttcggattcgcccccgcaatcggaagatgcaagaaaaatgggcagccgatgatcggctgcccattggttaatctggtcgggttgacaggatttgaacctgcgaccccttgacccccagtcaagtgcgctaccaaactgcgccacaacccgttcatgcatgctttcgattatcctcaaaagcagcgatgtctatcttagtggtaatccccgtccatttcaagagccgatttcacgattgcgggagttttttcacatgctattcggaaagacggcggatcgcgttgtcgagaatgatatcggcgagttccgacttcgacatccgaggcacatcgatgatgcccgcttcctccacgagccacaccttgttgtcatcggttccgaaccccacgtcaccgcccacatcgtttgcaacgatcatatcggcgttcttacgatgaagcttcgcctgggcgttttcgatgacgtcgttggtttccgcagcgaagccgaccacgacctgatgggccttcgaagctcccagcgtcgcgagtatgtcggggttctcaaccagctcgatcgatgcaagctcgctatcggatacgcccttcttgagcttgcggcctgcagggttcttcggccgcatgtcgctgaccgccgcagcgaacaccgcgatatcgcagtcggtgaacgcctcctcggcttcggcgagcatctcccgggcgctctgcacgggcaccatgcgcaccccatcgggcgcgtcaagggcggtcggtccggatacgagcgtcacgtcggcaccgcgccgtgccgcggcacgggcgatcgcatagcccatcttgcccgacgaatggttcgatatgaagcggacgggatctatcgcctcgacggtcggacccgccgtcaccatgatcgatcttccctcaaggtccctcttcacgcccaagacgtccagcgtctgccgcacgatctcgtcaacatcggcaaggcgtcctttgcccacatcgccgcaagcaaggtacccatcccccgcttcgatgaaatgcgctcccctcgtgtggagcacgcccatgttgttgcgcgtggcggggttgtcgtacatatgaacgttcatggcgggtgcgattatcagcggagccgtcaaagcgagcgcggtcgtagtcaaaagatcgtcggctatgccgcacgcgagctttgccagcacgttggccgtacacggagcgatgagcatcgcgtcggcttcctgagcaagcgagatgtgatggatgggatcccccggctcgtcgaagaggcgcaccgctaccggctcacgtgtcagcgcgcgaaacgtcgtcgggccgacgaactcgcaggcatgctcggtcataaccaccttgacccgtaccccggccttctggagacccctgacgatctccgccgatttataggcggcgatgcatcccgtaacgccgagcaccacggttttccgacaaacgtcagtcatcgagccacgctcctacgtagggggaggtcacttcgtagagcaccttcgcgtgcgccttgctgcgatcaaggcacggcacgtagacgaaatggtcgtccgaaacgggccttcccgccgcgcgcgccttctcgaagtacagcggcatgaattcatcgcctacgtcatgaagcgtctccagacagtcaacggcgaatccggggcatacgaaaaacaccctgccgacacccgattcggcccagcgcgccaaaacgtccttcgagtagggggaaagccattctctgcccttgtcgaagcggcattggtagccgatcgtccaccgcttccgatcgatgccgagctcgcttgctatctgcaggctcgatgcgccggtctgaagctcgtaggtgtcccccgcttcgatgtcgaccaaggggatggagtggaacgagaacaggatcacgtcatcggattcgggatcgaaccccgcatgcttgatagaggcggcaagcgctttgatataggtgaggttgtcgtggtagttgtcgatgagctcgtaggtgccatcccacttgattttgcgtaccgcccgctcgactccatcatgcaccgcaccggtggtggaatacgcgctttgcggatacaggggaagcacgatgaggtgcttgcatccgcaatctttgagctcgcgcatcgacgcggatatcgtcggctcgctgtagctcatcgcgtaacggacttcgaccgtgtttccgaaccccgcttcgccgaatgccgcagacagccccgatacgagcttctcgtggcccacgttcaggggcgatccttcgtcggtccagatggcttcgtacttcgcagcgcttttcctcccccgcgagggcaggatgaacagatggaggatcagccaccaagccgccctgttcataggcgctatgcgcttgtctatgaggaactttccgagatacttccgaacctctttcggggttggcgcggcgggcgtacccgtgttcaccaataacacgccgcaacgagtatgcgccggcatatgtccatcactcctgccattcggtaagttgaaatgaaactgtcattcaggttcacgaacaatctagtatactctagcctcatatcaaggcaagaggagcgcatggatgggaaagcaaacggaaaaaacgggatccgaccaaatcgaggcagatgaaggtcggggcgaatcgtccgcatcgaacccgtctgttgatccgtcttccccgcatgatgcaaaagccgcctgcgaggaaaacccgaaagaaaaccccttcgtggaattcgccaccgagctcaaagcccagatcttccacaaccaagggttcttgaagatcgactacttcaccatgttctggctgtttgtggccggatcggttatcgggcttaccgttgaaaccatttatcacgccatcgtgttcgggggatgggaaagccgtgcgggcctcgtttgggggccgttctcccccatatacggatcgggcgccgtgcttcttacgctgttcctcaaccgctattaccattcccacaacctcgtcatcttcctcgtgtcgatggtcgtcggttcggcaattgaatatgtaaccagttggggaatggaaacgttttggggagcgatcgcttgggattacaccgggacgttcggaagcattcagggcaggacgaacttcttcttcggcatgatgtggggcatgctcggactcgtctgggtgcgcatcatcatgcccgtggtgaagcgcgtgttctcccatgtcgattccaagaacaaagtagcgcgcgtcctgacggtcctcatgacgctgttcatggctgcgaacatcgtatgcacctgcttggcgctcgatcgcgaaagccagcgcatggcgaacattcccgcaaccgatccgatccagaagttctgcgacgacgtgttccccgacagctacctgcaggcgcgctttcagaacatgacggttacggcaaagaaatagctccgcgcacatgcgcatcggcgtccgatgcgtctacggcatttctcgcatccgcgccgcctcgatggcggaaagcaccgcttcgcccgcttcggtacggccctgcgtcctctcggcgatcgattcgagggcacagctcaaatcctcaggcaagccgtcaacgaactcaaggtcctcccccgtgacaggatgcgtgaacgcgagccgatacgaatgaaggaactgccgcgtcaagccaagctgtgcggcggggctgccggttccgtaagacggatctcctacacaggcatgcttgatgtagttcatatgcacgcggatctgatgcgtcctgcccgtgaaaagcttgcagtcgagcaacgtgtagccgtcatccttcgatccggcgtcgaaccgctcgagcaccgtgaacgtggttatggagtcgcgcgccgacggggaatcgcttacggccatgcgcgtccgttcgcgatcggcgcgagcgatgggcgcgtcgatcatcccggtatcatggggaatcacaccctgcacaagcgtcaggtaatgacggtcgacgattcgatcgcggatatcatccatgagcgcctgtcccgcatcgtcggttttcgccgcaagcataagcccgctcgtatcccgatcgaggcggtgcacgatgccgagcctatcccgatcgccttgtacattgcacaaattgtcggccccgcagtgatagatgagcgcgttgacgagcgttccgtcgaaatgatcgggagaaggatggcacacaagccctacctgcttcgagagcacgataagatagtcgtcttcgtatctgatgtcgagatcgatcggctggccgagcaaatgcgtcttcggagcctcctcggccacctcgtagacgatcgtatcgcccgctgagacgaccgccttcttcgccaccgtttcgccgttgacgaacacgcgaccatcctcgatcgccttgacggcggccgaccggctcgcatagagctcgcgtgcggcggcaagcacatcgaggcgcatgccgtcgtcttgggcggcgacgatatggacaagagaacgcgccatcaggcaatggtctccttgccctcgcccgccccatgggcggcctcggcgctctcatcatcttcgggtgccgcgtcgcgcgccttcccctcggctgccttttccgcgcaaggttccgcatcgccgcaatcggccttctgcgcttcgagcgcagctttccgatccgcttttctccacgcgtagagcatgctcgcgatgaaaacgacgaaaccgcacgtaacgccgatatccgcaatgttgaacacggggaaatcgatgaacgtgaaatcgatgaagtcgacaacgtacccgagcgtgaagcggtcgagcgcattgccgatgccacccgcgaagacaagcgcgagcccgatgatctggccctcgttcatatccttcgatgcagcgaacagatacaccagcaatgcggcgcatacgagaaccgacatgattccaagcgcaaacgtggaatcgccgaacatgccccacgcggcgccggtattgtggacgaggcgaaagcggaacaggcccgcgatcggaccggtgatcacgtcgccaggtgcgaaggagccgttgaagtagttcttggttgccatatcgaaggcgagccacacggccgccaggcaggcgaataccagagctgcgcgaacgcgcttgccccgcttcgaggggttcgcgggcgcttcggcctgaagttctgtccgaggttgctccacgttgctattccttgtagccgatggcatcgagcgcatcgccgcagcgcatgcatacgctggggtggttcggattgccgccgagctcccgataattccagcagcgcgggcacttctcgccgcgggcttggccaatgcggacaccgagctcgtcgccttcgacgaatgcgacctccgacacgataaagagctcttcgaacacctcgggtgcgaactgctcgaccgcgtcgagcaccgaacgcggtgcagagatctcgatggaagcctcctggctcttgttgatcgtctttgcgccgcgcgcctcttcaagcgctttcatgaccacttcgcgcacgtcgagcacgacgccgaacgcctcggcgatcttctcggatcccgcctcgggaatggccggcatgaagtcgctgtcctcgggccatccggcaagctgcacgctctgcggatggccgccatcatagcgaaggccctcgggatagctctcccacacttcatcggttgtgaaggacaggatgggggcgagaatgcgcacgagaacctcgaggatgttcatgagcacggtctgagcgccgcggcgcagaagggaatcgggcgcttcggaatacagacgatctttgagcgcatccatgtagacggccgataggtcgcttacgatgtagtcgtacacggcgcggtacaccagatggtacttgtaggcgtcgtaggccgcctcgacatcgtgcagcagatgccgtacgcgcacaagcgcccactggtcgagcggagaaaggtcgtcccatgaggcgaccgcatcgcatcggtagtcgaaatcgctgaggttgccgagcagaaacctgaaggtgttgcgaatgcgccggtacgcctcgctcgtgcgctcgagaatctcgtcgccgatattaacatcctgcgagtaatcgacgctcgacacccacaagcgcagcacatcggcaccgcttttagccatgacgtcggcagggtcgattccgttgccggccgatttggacatcttcttgccctcggcatccatcgtgaacccgcagtgcatgaccgatttgtacggagcgaccccataggcccctacactcgtaaggacagatgactggaaccagccgcgatgctgatcagagccctcgaggtacatgtcggccgggaacgtgagcccctcatcggcacggtagcggcacacgctcgtatggctcacgccgctctcccaccatacgtcgagaatgtctttctcgggaacgagctcgtgggagccgcacacctcgcaggcgatgcccttcggcaggtactcgctcggatccttcgtgaaccacgcatcggcgccttcgctgcggaacagctcgatcaccgcatcgaacgtcgcttcggtggccacggtgttgccgcatttcgcacacttgaacacggggatcggaacaccccaggaacgctggcgcgagatgcaccagtcgggacggtcggcaaccatcgacccgatgcggttgacagcccattcgggtatccactgcacatcgttctcgatgacgcgcaaggtgttctcgcgcagcccggtcttatccatcgacacgaaccactggtcggtcgcgcggaagatgacgggtttgtggcagcgccagcaatggggatagctgtgcgtgatcgtcttctcggcaaccaacgtgccctgttcgcgcagccattcgatgatgacggggttcgcctcgtcggtatcgaggcccgagaactgccccgcctcgtcggtgaaacggccgttgtcgtcgacgggcatgagcaacgggatatcgaactcgagggccacgagatagtcgtcctggccgtgtcccggagcggtatgcaccgcccccgtgccggtatcgagcgtcacgtgatcgccgtagattaccgtacccttgagatcctggcgaataggcgcggtgtaggtgaggccgtagagctcgcggcctttcagcgagacgggctcgccatttgcagccgaaacgacgtgataggcctcccaacctgccgtttcggcaacttgctcgacaagctcttcagccataagcagatagcttccgtccacctcgaccatgacgtagggggcatcgggagcaaggcttaccgccgtgttcgcaggaagcgtccagggcgtggtggtccagatgagcacgtaggcgctgccatcgacccctgcggcttcgaaaacgccgggaatggaatcgagcttgaatttcacgaagatcgagggcgacgtctcatcgctgtactcgatttcggcttcagcaagcgcggtatggcagcttttgcaccagtgaatgggcttgcggccgcgatagatcgcgccgtcgagatacatctttttgaatatctcgacgttgcccgcctcgtagccgggcgtgaacgtgagatagggatgctcccaatcggcgttgacgccgaggcgcttgaagccctcgcgctgcacgtcgacgtacttttcggcccattcgcggcaaagcctgcgcagggtcggctgctcgatagcggccatcttatcgggtcccagggtcacttcgaccatatgctcgatcggctggccgtggcaatcccaaccggggatgtagggcgtatagtacccgcgctgcgcatggctttttatcacgaaatccttgaggatcttgttgaacgcatgtccgatatggatcggaccgtttgcatacggggggccgtcatgcaaaacgaagggcttgccatccttgtttttctcgagcaccttccagtaaagcttttcctcttcccacttcgcaaggcgcttcggctcgttttcgggcaggttcgcgcgcatggcgaaatcggtcttgggcagattcatcgtttccttgtagctgtttcccacgccgtctcctcaggttatcgttaccgctcaggcgcaaagcctggataatcgcatcaaacttgaacattataggggaatttccgcatttaccccctgccttgcgatacttttcaaaattgtgacatacgcggtcgtatcataatgtttatactggctcaggacacaatttaacgacaagcatgatacgaggtgacccatgggctttgaaatcgttaccgattcgagcagcaatcttttagaggatatgatcgatgacttcggtcttcacatccttccgctcacgttcatgatcgatggcgaacagtaccagagctatctcaaaggcgagagaaccgatctgaagcaattctatacgatgatgcgcgaaggcaaggtcataaccacatcccttccgaacctcgccgattccgaaaagctcttcagaaaactgctcgaagacggccaggatattctgtacctgggcttctccagcgggctttccggaacctacgaggccatcgatttgctgctgaaggatttaaaggccgagtttcccgaccggacgatccgttcggttgaaacgcttgccgcttcgggcggcgaaggtctccttgtgtattacgcggtgcagaagaaacgcgagggcctcggcatcgatgagattgcggactgggtgaaagagaaccgcctgcacctggcgcattggttcaccgtcgacgatctcatgttcctgttccgcggcggccgcgtttcgaagacgagcgcatgggccggcaccatgctcaacatcaagcccgtcatgcatgtggacgatgaggggcacctcattcccatggagaaggttcgcggacgcaagaaatccctcaatgcgctggtcgaccatatgaggaaatcggcgatcgagccggtttccgaacaggtcgtcttcatcacgcacggcgattgcatcgaagatgcggaatacgtggcgggcaaggtccgcgaagagttcggcgtatccgatgtgtacatcaactacgtcgacccggttatcggagcccactcgggtccgggaacgatggccctcttctttctggccgacaagcgataagcgctatccgaccgaaacgatgaagccccgcatcctgcgcgcgcccgaaacggctgcggcaggatgcggggctttctgcttaccgcacgaagcttcgcaaacggctgaatctcaacgtctgccgatgatgatttcgcgcagcgcggataaaagcttctcgttgtcttcgcggcttctcacgcccacgcagaagtactttccacccgttatgccgggcattccttcaagcttccttacgagaaaccctgcaagctgcaggcgcaagaccagctccgaggtattcgccacagccagatcaatcggagccgcattgtcgaacgagcacatgacgaaattcgcctctgcagggaaaatctggatgccgggaatgaggttgagcatgcattgcatccagggaatttcagtatcgaggaactcccgggtcttctcaaggtaatcggcggattcggtgtacacgtgcgcgccgacaacctccgcgaacatcgaaagccccgaattgtcgaagaactgctctatctgcataatggtatcgggatgagcaatgcagtagcttatgggaatgcccggcatagcgaaggcggagctgagcgatctgacgatgatcaggttccggtaccgatcgataagcggaatcatgctttctccgccgagcgtcaattctatgaggctttcgtccaccaccacccatgagcacgcctcgagatagttgacgagggtctgcttgggaagcaagcggcttgtcggatacgtcgggttcgcgagaaccgcagcatcgaacctcagtccgatatcgtgggctgcgtgcacatcgggaacaacgaacgcatgaggagtggaaagctcgaccacatcatggcccgcgttcgccacggcaagcatgaattctgcagccgccggagacacgatgcctaccgaacacggcctataggtctgcgccaccgaccgcaccatatcgctcaccgatgttccgcagagaaacgactcgggtgcgatgccgaatttacgcgcaagagcagcgcgaaacgtatgggcgctgcgatcgggcatatagctcagctccccatcgaccaagccggtatgcatggcgcgtatgaacgatttcggcgtgccgagggggttggccgttcccgaaaaatcaagccaattcatttcggtacgcagctcgtaaggaagagacaacggcttttcaggttgcgccgccatggcatcgcgaacgctcgagcgagcgttgaacccaaacaatgccgacatgtccttccctccttttttcacctcccgtaacgctcttgccgctacggggaaaccaatcctagcacaattcaagccccttatgcccgacatgttagactatcaacaccatgtatggcacacacggacatacgaatgatcgcgaagaacctggcatcgacgccgcaggacggcttcccgcatggcacggtcctgcaatcctgctcgtcgacctcgatgcgttcttcgcttcggtcgaacagctcgaccaccctggctggcggggcaaacccgtcatcgtgggcggcgatcccgacaagcgcggcgtggtatcgaccgcatcgtacgaggcgcgcgtcttcggggtgagaagcgccatgccctcgtcgcaggcggcacgcctctgccccgacgccatctggacgcacgggcactacggccgttaccgcgagatgtcgaagaagatcatgggcatattgctcgatgaaagccctcgaatccagcaggtaagcatcgatgaggcgtttctcgacgtatcccccacggcccacgtgaacgaacaccccatcctcattgcgcagcgcattcagaagagggttgccgatctcggcgtaacctgctccatcggactcggcactacgaagaccattgccaagatagcctcggatatggacaagccgcaaggtttgaccatcgtttatcccggccgcgagaaagatttcctgagccctttgcccattcgcaccatgagcggcgtcggacctgctgccgagcgcgcgctcacctcgcacggcatccgcacgctcggcgagcttgccgcggccgacgaagcgctgctcaagcatatcttcggcaagaacgccgaggtgatcatggcccgtgcgaacggaggcgacctcacgccggtcgccgacgacgatcccgtcaaatcggtctcgaacgagacgagtttcgccgaggatctttcaagtgccgaagaggtggaagcgggcatcgcgaccatggcgtcaaaggtcggcaggcggcttcgcaagaagggcatgcggggccacacgatcagtctcaaattgaggttttccgatcgaagcatccgaagcgtgcagaaacggctcgacgaggcgaccgacgacgacttgcttttcacccctttgctctaccgtatggcccgcgagatatgggagccgggtatcccggtaaggctcatcggcgtcggcatggccggattcgacgacgacgaaccgacgcaggatgctttgttcgatgtgctgcaggaggcgccgagcgaaaacgacgtcaagcccatcatcgaagacgacgagaagagaagcgggcttctcgccgcaaccgacaaggtgaaagaccgattcggcgatgcggcagtgaaattcgggcgcgagctttccatggaacggcgaatcaccggttcgggatcgaagaacccatccgattacaagtagggcgaaaaaggggccggctgaaccggcccccgcattcccatccgctcgatcgcgcggcgctctgcccgcgcttgagacgcagcgagcgtcagttgaacttgaatatcttctgagccacacgatagcccgtaaggccgatgcgcctgcccaccgcagtcggaagattcgtgcccatgttcaagacgctgcgccgaatacgccggtagagcgcatcgtttcgatttttgaggtacatccagatatcctcgcgcttgtcttccgattcgtcggtgttctgcatgcgcaaaaagatcgagcagatgcacatcatcatggaaagatagttctccatgtaatgctcgagccgcttgtcgggcacgtcgtcgggcagccgaaccgaatcgatcataatgcgcgtcacgcgaagctgctggtcgatgcgcgacatcatgacgctttcgttcacgctctgatcttcacgcccgatgtagtatcggtacatgtccacatcgcggtaatacatggttctcacatgcggcagcgggacgtacacgaatatgttatccacataaaacgtgtgctcgggaagctgcaggttcatgtcgcgcagaagctcggtgcgataaatgaccgagtgcatgagcaggtactggctctgagagaaatgtccgacgtcttcccatccgaactccctgccttcgggaaacacgttgcggtagtgcatgatggtccgcttcccctcatgcaccttttcgtacacgtagttgccgatcacgagatcggtcgggctttcccgctccacctgcttgcgcaggtacttcatgatgtcgtgcatggcggcttcgtcgagccagtcgtcggaatcaaccaccttgtagtacaagccgcttgcttcggcgaggccggcattgaccgccgaaccgtggccgccgttttccttatgaatcgccttgatgatgccaggatggcgcgaggcccactcgtcggccttctctgccgtatcgtctttcgtggacccgtcgtcgacgatgaggatttcgatatcatccccgcatttgaggatggattcgatgcatgcgtccatgtacgacgctgaattgaagcacggaacggcgaatgagacggttttcatagatgccgcccgactattcttcgccgacgagttcgtcggcgagcgcgagcgcgcgtccgatgataacgtccatgttgtaataccggtactccgcaaggcgcccgagcggatggaagttcgcaagtccgctcgtcaacttgaggtaacgatcgtaatgggcggcgttctcgtcgttgatgatggcgtagtacggaatctgggtcttcggatcatcgtatgaatgcgaatactctttcatgatcgtggtcttcgcgctctcctgccccgtcaggtacttgaactcggtgatgcgcgtgtaatcttcggtgaccgtgaagttgaccgttccgcagggaagcacgtgctcgacgtcgtgcgtctcataggcgaaatcgaggcttcggtacggcaacctgccgaaccgagacaggaaaagctcgtcgagcgggccggtgtatacgatgggcccgtcgatcggtacgtcctttatcgatatggccgcaagcggggcgttctcgtcatcgctttcgaattcgaggtcgaagatgctctccgcctcggtctccaggcatacgtcgatgagatcgtgatcgagcatgctctcgaaaagcggcgtgtagccattcgccggcatgccctgaaaggcatcttggaaatagcggttgtcgcgcgagacgaacacgggcacgcgcgccgtcacgctcggatcgacctcttcgggcgtgagcccccattgcttctgcgtgtagtacaggaaaacgttcttgtagatgaagtcggcgatctccgaaagctcagggtcgtcctgggcgcgcagctcgttgatggtcaccttgcgttcgtcgccgaacgtttcgatgagcttgtcgatcagatgcgcggccttctcttccccgtagacgatctccatcgagttcttattgaaagggacgggcatgtaggtgccgtaccaatcggcaagcacctcgtgctcgtaatcgcgccattcggtaaaacgcctcacgtaatcgaacgcgcgcttgtcgttggtatggaagatatgcggcccgtagcgatggacgagaatcccgttttcgtcgagctcgtcgtacatgttgccgccgatatgggccctcttctcgataatcagcacgcgcttgttcgctcgctcggcaagctcccgagcgacaacggcgcccgcgaagccgcttcccacgacgaccgcgtcgtaatcggccacgtcgagctccttgaaactgcgcacctgtacacccatgtgaacccttccttttggaaacgtatgagacaaagcgacaccccggcctctgtttgccgatgtcgcgcagcggactatcgtcctgcatattctgccgagaatccattttaccgtgagacattgcaccgcgtcccattatcatataatttggacaaatcgagaaaggacggactaccaacatgggatcattcatcgacaccatccttgcgaaggctgcatccgataagcagaccatcgtgttgcccgagggagacgacgagcgcacgcttaaggcagccgaagctattttggccgacgatatcgccgatttggtgattctcggggatgccgatgcgattacggcaagttcgtacaacctcgaaggagcaaccgtcatcgacccgcgcaccgcggcagagcgcgatgagttcgcacatgccctgttcgagctgagaaaagccaaaggcatgaccgaagaacaagcgctcgagctcatggataacgtgctgtacttcggaaacatgatggttaagctcggacgcgccgacggcatggtgtgcggcgcctgccactcgacttctgacgtgttgcgagcttcgctgcagattctcaaaaccgctcccggcgtgcgtctcgtgagcgcgttcttcatcatgatcgtgcccgattgcgagtacggcgatgacggcgtgttccttttcgccgactcggggctcgaaatccaacccgattccgagcggctcgccaacatcgccgtgagctcggccggatcgtggaagacgcttatcggaaccgagccgatcgtcgcaatgctctcccactccacctacggctccgcctcggcgaacgccgatcgggataaaatcatcgaggcaaccgagatcgcccaggaactcgctcccggcatccgcatcgacggcgagcttcaactcgacgccgccatcgtgccctcggtcggcgcatcgaaggcacccgaatcgccggttgccggcagagccaacgtgctcatcttccccgatctcgatgccgggaacatcggctacaagctcgtgcagcgccttgcgaaagccgaagcgtacggcccgatcacacagggtctcgccgcgcctgtgaacgacctgtcgcgcggttgctcggcagaagacatcgtgggcgtcatcggcatcacatgcgtgcagtcgcaggcgaaaaaggcccagagctaagatttcgccttgcatacccgatctgacggcgctgcctcgaaaggcgcgccgttttttcattccccgtcgtcgatataggagagcagcaggctgatgagctcctggcggctgtgcaccgatgtcttgccgtagatgttgcgcagatgcgttcgaagcgtgctttccgttatgtagaggctctcctgaatggcaacgttgttcttgccccgcataacaagttcggcgatttccgactcccgcttcgaaaggccgtattcccgcgcagcgcactgcacgctctgagcgaccgattcgcccgcttcatcgagtttgtttttggcgatcgagcgcttctcgaagaaacgccttacatcgccttcgctcataacgaaggcggacgttcccacggtcagcacgatgatcgccgatatcataatgggaagcggaatggtcgcaacgggcagaaaagtgtcgcaggccaactgggccagcgtgctgcaaagcgtcagggtgaactggcccacggcaaaaacgcacgccgcgggagcacgggttcgcatggcgatgctgcaccagagcgtccaggtgaatatcctgaagaacgcccagctgagtcctatgataaacgcttcgtactgctgattgccggcttcgagcgtcaaaaccaggatcacgctgacgatgataagcggcgtgagcatgcgatacaaaatggtgaaattgaatttatcgcttcgccgcgttgccaacagggcgatgcagatcgacaaggcgagtcccgcgatcagcgtctgcagctcttcggcagcgggatacttcgtttccgaaagcatgttgacaagcagatgggcggctccgaaaagaccgatgccgatgaaaaggcgcaggggaagatgggcgaagggccttccctcgcgggcaggtacgccctgcaaagcgtaaaacgaccggtcgctccgcaagatgagcagcgctgctccagaaatcaggggaaacagggagtgcacgaccaaagcgggaaccggttgcagtcctgcgaccagaaggcacagggcgaaaacgatcgcatacgacgaggaaacgcatagaagcgcatcgcgaaaccgcactcggcacaggcattcggcccagagaagcagcataatggctttcgatgcggcaagcagggaaaaaaccgccgccccgacgggaacgtcaagcacccaaccgcataggtacatgcccgcagtggatgcgaagaccagaacggcagccaagatcacgatcagcctgctcgagagaagatttttccttcggtgcgcgtaccatcccgtcgcaagaagcatcacgaggaacagggcggtttgcagatagctcgtcggctcgaggatatccgaggctccactgtgcggctggggaaacagcgttggggagataccgaccgtctgccaccccacatagaacccgagtccgcatatcagcaatgcgagcgtaggggccggcaaggcctcagaagaagcagtcccccgcactgtgccttcgcagttcatattcctcccattcccaagatgcccggcagaaagcccgaaggagcatcggcttcagcgacgtcccctacccgtttggcgttgcgccgcagaaagcatcatccaacgaaccatactacacaatacctcgaatcgaaaagtccactttcggagggcgagagcaaaatccctggtgcggctttaaaaatacctcaccgatacctcacgattacctgactgttttcaacaataccccatcgaaaggtttgacgttatccgaacccgctcgctttaatgcatgcggtcgagccgatacgaacggcgacgcaaagagaccaactgcaaagaacacggaaaggatgatgaccatgagaaggcagatcgccgttgcggcatggtgcctggcgatgtcggtgagccccctgcttgccggatgcagctccaacgccgacgcgaagaccgagcagccggaagcgaacgccgaggcgagccaaagctccgacgcaccagcgcccgccgccgacgtgaaggccgtcaaaaacgactacgaagacggtacgtatcaaggcgagggaaaaggaatgggaggccccatcaccgtatccctcacgataacggatggagtgataaccgtcgacgagataaccgagtcgggggaaaccgccggcatcggaggcaaagaagccatcgaagacggtaccttcaaggctcaaatcgaagaggcccaatcagccgaaatcgacggcgtttcgggtgcaaccatgacctcgggtggcgttatgaaagccgttgaggcagcgcttgcccaggcgaaatagatccctgcaaaactttcgatccttgttcggcgcaccgtcgtgcaaggcgaacggagatcgaagaaagacaaaagagaagaaggagaacaggatgaatatgaaccgtcgtcaattctgcgcactcggcactgccggcgcgatggcagcgatcgccggtggggtgagcttggggtgctcctccaccaccgcttccggggaatcgggccaatccgaacctgcagcgaccgccatggcaatcggggacgccaacgtcaacttcagccaagaagtcgatatcctcatcgtgggcgccggcatctccggcatgctcgcttcaatcgatcccgcatctgccgggcgcagcgtgcttatcgtcgagcagaattcgacctatggcggagacgccatctactcggcagcctgtcaaatgtgcacgacagccgagcttacgaaggaagaacgccccgataagtacatgagcgaagacgagatccgcgaaaagttcgcgccgtattaccaagggaacgaagcgggcctcgaacgtaccgttttgcttcagaaatggggcggcaagttcatcgacaccatgcactacgattggggatacgagttccaggaacttcgcgaaagcccctatcatcaggcgttctttccgaaaaacggtctgtgcacaatgaaggacgaattcgagctgatgaacgagaaagtcgtcgaagccggtgcgcaatacctgttcgaaacaaccttcaagacccttataaccgatgagacgggcgccatcgcaggcggacggttcacctcaaaggacggctccatcgtcgacatcaaggcgaaggctgtggttcttgcgggcggcggatacatttccaaccaggagtggatggtcaaatacgcacccgaatgggctttcatcggcaacatcgtcgccggacgtaaaggagacaccatcgccgcaggcgttgctgcaggcggcaccctttccggcatgatggcttcgggcaacctcaatccccgttacgaagccggccacatgctcggcaccttctatccgctgatcggcctgctcccgaacggcaagcgcttctacgccgaaaccgccgtgcacaacgccgccaccggatgcctcgccgcagggtacaacgaatggtacagcatctgggacgacacagcccaaaacggcatcgaccaagaggtaatcgcccatgccggcgatgccatccaaacggccggctccatcgaagaactcgcggagaagatgggcatggcacttgaaaccgtgcaagcggccttcgatgattgggatgccatctgcgacaaccagtccgacccggagttcggaaaaacgctcttccttcagaaactcgttcccccgtattacttcatccgcaacgtccccgtgcgctataagagctgcggcggccttgcagtaagcgatcgcatggaggtcgtcgacaaagacggcaacccaatccccaacctgtacgccgccggttgcactgccggaaccgaggatatcgttcccgccgccggatcaggtttgctgctcggttcggtgctagccgaggacctcgcatagcgaaaggggttttcggcagcgcatggcgccgccttcccttggaaaaaaggagctgcaccgttttcgatgcagctccttgccgttctctatcgccttttgcgcgaagcgcgccgcagcagcggctcgcttcgccccgcgaggcgtgctccaggcctttccctacgccgtttcggatcccgcttcgatcagctggcttttggcgtagacgatctcgtaggtgtcgcgggcgatcatgtattcctcgttggtgggaatgatgatgatcttgactttcgaatcgtcggtggaaatctcgcgctcgaagccgcgctggcgattcttttcctcgtcgagtacgatccccaagggctgcaaccctgaaaagatcatgcggcgcatcttctcgcaattttctccgacgcccgcagtcatcacgatggcgtcgacgccgcccatgacggcgatgtactggccgatgtacttcttcaccgagttcgagtacatgtcgtaggcgagctgtgcacgctcgtggccctgctccgaggcgtctttgacgctgcgcaagtcgttgctgattccagaaatgcccagcaatcccgatttcttgttcatgagttcgttgacttcagaggtcgaaaggccctcgtgctccatgatgaacggaacgatcgccggatcgatcgcgccgcagcgggtgcccatcatcagaccgtcgagcggcgtaaggcccatcgaggtgtcaacggcgacgccgtggtcgatagccgaagccgagcagccgtttccaaggtggcaggtaatgagcttaagctcgtcgagtggctcgttgagcaccaccgcagcccgttcggcaacgtaacgatgggatgttccgtgtgcaccgtatttgcgaatcgaatgcttttcgtacatttcgtagggcagcggatacatgtaggctttcggcggaagcgtttggaagaacgacgtatcgaagaccgccaccatgggcacgttcggcataagcttctggcatgcatggatccccatgagcgcagccttgttgtgaagcggcgcaagttcggcaagctcgtcgatcttcgcaatcacgtcatcgtcgatcaaggccgacttatcgaagtacttgccgccctgcaccacgcggtgtccgatcgcatctatctcgtcgagcgagtcgatcgctttggtcggcccgtcgagaagcgcatcgatgacaagggccatcgcggcgtcatgatccttcatttccgcgtcaagcacatgctcgttctcatcgaggccgtgcttgtggaacgccccgctcgatcccactcgttcgcagatgcccttggcaagcagcttctgctgttcgacgttgaccagttgatatttcagggacgatgaacctgcgttgactaccaatacgttcaaaattccgcctcctcatgcactcggtaagctattaattttaggggttatcagcccttctgtccgattgagtggtcaaggatctcggcaaacggcagcatgttatagaaaatacacagattaggatgcaaagcagacgaaaaaagcaccctcgcgaggaaggtgcttttcagcggtagcgctttaggttgccaaaccccctacgagagagccggcgatccggaattcataggggcgccgccgagtacgtgaacgtgcagatggtgaaccgactgctgcgcgtcggatcccgtgttgacgataacccgataccccgaatcggcgattcccttgatttcggcgactttcttcaccgtattgaacacgtagccgagaagctcgtcggaaatgccgtctccgatgttcgcatagtgctccttcgggatgatgagcgtatgaacgggcatctgaggattcagatcctcgaacgcgagcacgcggtcgtcttcgtagacgatagtcgaggggatctctcccgctgcgattttgcagaaaatgcagtcttgcatgacgcttcctttctcatcgctgtacgcaaggcccgaccgaatcgacatgaaggcaaccgggctccaatgccattctacgacaaagtcgtatcggttgccgcatcgttggcgctcgtttccaattcgcccatcagcacatctaccttttgctgggcatcgtttaaccgctttttcaaagcaccgagcagcgcgacgccccgttcgtagcttttcaagctatcctcgagttcgagggtgtttccctcaagcacgcccacgatgccctcgagttcggacatggcttggcgaaacgtcatatcttcgatgggttgtgcattatcgctcatcatcgcctccaaacgaaatcgtttcaatcgtaatcttatgcaccgcattgacggtgcagtcgagcctgccgtcggctacctcaacgcacacggcttcgttcgcttcgatgccatcgacgcttttcacgatactcccctcttcgtctttcgcgatcgcataaccgcgcgaaaggatggtgagcggagagagatcgtgcaagcgcgaagcgcccatggcgagttggttttcgaaacgcggcagcaaggttgcaccgacagagcgaacctgatcctcaagatgacgcagcttcacgcggtcgcgttcgaggttcagcggtatcgcccgctgcaagcggtcttcgaagagatcgaggctctgcgcctcgacggcgaacaacatgttcggatcggcgaacacgggtcgctcggctatacgctcgacaaccgaaaacgcacgctcgatgcgcctcgaaagggcacccgaaagcgccgctccgcgaacacccagctccgattcgagcccctcaagcgaagggctgacggcctccgcagcagcagtcggcgtcgaagcccttacatcagcgaccatatcggcgatgctcgtatcgggttcatggccgatgcccgtcacgacaggcacgccaagcgtcgcgatggcgcgcgccaggccctcgtcgttgaacggcatcagatcctcgaacgaaccgccaccgcgaacgagcagtacgacctcggcccccgcgtcgcgaacggcttccaggcctgcaatcaaaccaaggggggcgctctccccctcgacggccacacccgccagaagcacggtcgcaaggggaaagcgccttcgcagcgtccgcagcacatcgtggacggccgccccacgcggcgaggtgacaagccccaccttctcgggcagtcgcggaatctgctttttccgctcggaccgcatcaacccttcggcttcaagcctcttcgcaaggttggcaacctgaagcctcaggttgccctcgcctgcaatcgagaggccgaacacatcgaagttcatgcgccccttcggagcgtaaagcgtaaagcgcccagtcaattcaaccagcatgccgacacgcagttcgaccccagcagccttgtagcggttgagccacatcatgcagggcatgctcgcacccgaatccttgaccgagaagtacacggccttgtatccaggtttgttcgacacctcggacacttcgccgatcaatttgaccgtgaacgattcgagcgatctcttcgcaagcgcgagcgcagccgatacgctcagcggctcgtcagtacgctcctcgacgcctccctgcatgcgctatcggcctagttgttgtcacgaagggtcaacaggtacagcagctgcaggatggaggtcagcgcagctgcgacataggtgaatgcgcacgcgcgcaaaaccgagaacgctcccgactgctcgccctgcgagatacccgtcgtgccgagatacgccatggcgcggcggctcgcattgaactcgacgggcagcgtgacgatctggaagacgacggccgccgcatacatgataatcgcaacgtcgatcagcccagcaaggttcatgaagatgccgatcagcagcaagaacatccaagcgttcgacgcgaggttgaccacaggcaccagtgcgctgcgaaccttcatgggcgaatacccttgcgcgaactgcaccgcatgtcccacctcatgacaggccgttgcgatcgccgtgatgctcgtgccgttgtactcgtcgggcccgagcgaaatggaattgttgcgagggtcgaagtgatcctgcccggcagcgccctgatgtatcgaaacgccgctcacgccattggccgcaagcatgcgacgggccatctcggcaccggtgatgccgagggatgcgggtaccttcttgaatttcttcagctgcgaattgacgtaaaaggtcgcgaacccgccgatggcaagcgtaacgacgatcaatgcaatgtagagggggctaattaccatagcgctctcagactccttacctggtggcgccaatgcgcgcgcctatgttttcatgtgtcgggaacagtatacgggaatcggccatccgttcgaaaacatcacacgattactgtgaagttttcgtaaccttaagcccacctttttcaagactgagcgctatgttacccgccagaagatcgagcagctcttttcccaccaaagcgcggcgccagccccgcagcagatcgattccatcggtatagccgcgagccacgcgcgcaaggtcgtcgtgcgaggcgagcgtcggaaacgccacgccgttctccttcgcccgcaagcggacgagcgccgtcatgagatcgagttccgcatcgacgtttctctcgttcttgctcgttcgatcggtttcgggccaggtttccttcggggcgtcgaggcctttggcaatgagggcgactacgctgcgcgcgtctttggttcccaagcgatcgctcaacccccgtaccatgaacagttcgtcgatcgtgcgggcttcgcgcttgcatgcctcgacgatctgctcgtcggtcacgatccacttgcgcggcacatcgcgccgctgcgcttctacctcgcgccacgatgccacctcccgcgctgcggaaagctgcttgcgcgacagttgcgaaacgcgcttgagacggcgataccgttcgcgctcgtttacctcgtagcggctcggatcggaaagcgcttcgaaatcttggtcgagccagtggagacgccccttctcctcaagtgccgcatgcatcgaggcgtagagcttcggcaggtagatcacgtcttccgccgcatagctgagctgagattgggaaagagggcgccgcgaccaatcggtgaaggagtctatcttcttcagctgaacgccgcactccgaatacacgagcgccgcgtaaccgatctgctgggtgtggccgagcaaggcggcggcgatctgcgtatcgaatatcggcttgggaagaatgcccatctcgcggtagagtatttcgagatcctgcccgccggcgtggaaaagcttcacgatggattcgtcttcgagcagcggcgcgagcaccgaaaggtcgtctacctcgaaaggatcgacgatcaccgtctcatcgtcggttgccatttgaagcaggcacaggcgggcataatatgttttctcgcggagaaattcggtatcgatggccaaaacgctcgattgcttcgcgcgcgcggcaaacgaatccagttcatcttggtttgctatgtacaagggacgtccttcgtgttttctcattccgtatgttgtactatcatagcaacagaaagggaatctgtgaaactgcttatcgttaacaatctcgcatccgggttcggcgaaggcgcgatctacgacttcgtcagatcgttcgtgtccgacggtgacgaagtgtgcatccggtcgaccgacggcacgaccgacttggcaagcttgctcgacaacgcatcggcctacgatgccgtcatcgcaagcgggggcgacggcacggtagcggctgtatgctacgagcttcgctactcgaacatacccgtattgcccttccccgccggcacagccaacatccttacgctcaaccttgcgtcgcccctcgagtcccacgcgcttgccaagctggtcaaatcggggcaaacgctcgacttcgacctcggcgagatcgaagtggccgataagacgttcggattcgccatcatggctggcgcaggctacgatgccgccatcatacacgatgccaagccgaacaagcggcttctcggccccatggcttatttctcggctgcaataaccaatccccttcccgaggtttccaagctctcgatcacgatcgacggcgaaacgatcgagcgcgaaggtctcggcatcctcatagtcaacttctcgaagatacagttcgacatctcggttacccacgaaaacgaaccgcgcgacggccaattcgaggttgtcgtcctcaaagcggaaaacgcgttcggcctcattcccgccgttgtggcgggactgctcgatcgcggcggcgatttccccgaccgcagcgatgcgctcgaaatacatcgcggatcgagcatcgaggtttcagcggatccccccatgcatgttcagtacgacggggaggccactgagctcaccacaccgtttaccgcccgaatactcaagggcgccacgaagctgttcgtctccgacgaggggcacagcctgttctcgtagggcgctgcgaagacacctcgccgtctgccgatccctcgtccgcaggcgagcctttggccggtgaacctccgttcacttcccgctagccatcaaccgccaaggcgatcccgagttccgcacggagggcgtagtgcttttcaacgagtttcggcgaatcgcagcgcaggcgcttccccataagctttgccaacgttttcgctgtctttcgaagctgaatcacgtcgtcgatctgcactcgggtaaccccgataacggttacgttgcgagccgcgagcgtattgcgccgttttgtatcactggctatacggaacgatcccgtgtgatgcaaatccgaatcgtattcgacggcgattttctgctgcggccagtacaggtcgcacacgcagtattcccgatcggccattggggccgcgcgtttgccgatgtcgatccggtagttgagcttcggcgccggaaggccgaatcccccaaggccgtacggcaggcacagcaacatcgcaagagccgtttcgcgcggcgaggcggacccatcgagaacgtacttgacggcacgaagcgccttctttctaccatatgcgccatccgccttcgcaacgaacgcgccgagcttttcggccgaagtgagcggcgagcgcttcctcatcacggctttaccttccgcgccggctccgtcccacgcagtcccctcgaccatcgcatatgatccgcaaagctcgtagccgagcatgatcagctgcgccaagctgagatcgcgagccatctgcaggaaacagaattcgggagtacttatcaagaaccccgagccggcatccgcaaacgctccctcgggaaggtcagtcaaccacgatctgctgagaatgcagtctgttcttgtgcgcgcctcttgcgttcccaccaaaacgaacaaaggcagaacgcatccgccgggtcgaaccgtgctcccgtcaagcgaagggctttcggtcgagcgcaacgcagcgcgggccttcctcgtcgcttttctgcgcatcgaggcatcgcgcaagaaccgcgcgccgacggtgttccaatactcaagcgccgttttataacctatcaacttatacatgacagacagtctaacaaatctggatgaaatattcggtttgggcactagtttttcctcgaaacgccatcctccaagcgctgctgaacgaatatatgcaggtcagttttttcaacgtccgaaaaatggcggcttatcgactagcaagattgcccaaagtccatttttctaccagattcgctgaaacctctgccatggaacttcgattttccaaccaaccagaacggactctttcactcggtttcgacacctgccccaggctctgcgccccgaaacggcgctcgtccgcaaagcggttcgatacgggcgcatatgcgcccaccaagcaaaacggccaccagggggtggccgttgcaaaaatcggttgtacgggcttacgtgcgtacggaaaatggttttccgccttcaccgactcgaaggcaagccgaggtctcccgcatgcgttttcgagcagctagtttttgccgaaaccattcgcggaagccgcggacccgccgtcatcgtcgtccacatcttctacttcaacgtattcggcctcaatctcgagcggcgcgcccaggggagcattcgattggccggaagcctccatgagcgatttgaacgtggtagcgtcttctccgtcaaccggcatcatgatatatacgtttccgccgatgaagacaggcgtgatgacagagggagacgtcggggcgccgccctcgtcaacagctttcttatccgcttccatcttttcgagcagctcctcgcgcacgcgctcgacctgacgagccgtatcggcgatccagcgatccttgcgccatgcggcgtagttcttgttgtagcgcatctggataagttcgaggacgatgcagaacaccatggcgaagtacacgatcagcttttcaagcggcatgtgaagaagctcgatgccggtatggaaacccgcgctatcgataacaagcagcgcgccgatggcgatgatgaacgtaagggcaagcatcttcatctcgggatgcccgttgatgaagttcgatatgggatcgatgaatatcatcatcatgaacacggcgagcatgacggcaatgatcatgatgatgaggtgatcggccatgccgaccgccgtgataacggaatcgatcgagaacacaaggtccatcaccatgatggtgccgatcgcctgcggcagcgatatcatgtggagcgccttgtgctcttcgcaatgctccgccttgatttcagtgagcttgagggtgtcgcgaagctcggagatccccttgtagatcaggtaggcgccgccgatcaagagcacaagatcgcgaaccgagaacccatgggcgtacgcgccgaggtcgattgtgaacaaaggctcggtcatatgcaccagaaacgatgcgaaacataaaaacaggatgcgcatgataagcgcgcccgctaagccgagcttgcgccctatgtgccgtttttcttccggaaggcgattcgtggtgatcgatatgaacaccaggttgtcaacgccgagcacgatctcaaggaagatcagcgtaatgaggctgatccatgcttcgggcgtcgtaaagatcgatagatccacaagttctccttttctcgtccgttctcgccagagagcacctgatcataaaaaagactcatggcacagctaccacgctgcaccatgagtctcgttatttcagacacgccaggtttttcaaccaggatgttgacgtgccgcatatattttatgccaactactccctcacggtgcggagtatcctaccatgagcgataccgccgcgcaatgctataatgcccgaagtacaaaaaggcctcaggagaaaacagccatggcaatgcatgtcaacaaacccgaatacgtcgatacagacgaagccgtccgatacctcgacggaagcagattgtcccggccgttttccatgcccgccccccagcgactcattgccgccggttttctcgtcgtcgcgctcgggatcggcgcctatctcggattcaaggtgatcgacgaagtggtcaatgctccggctcgggcagctgcgagcgtcgaagaaaacctcaatcgcgatgtcgcgctcgacctcccctctcttccggcgctcgtttcgtacagcgacgaggacatccgcgcaaccttcagcgatgcgggctacacgatttacgacaagaccgaggaggagatcgctgcggcgggcgtcggcttcgacctcatcaagctcccaagcgacgtcagcctcgaagaagcggggcttctgtatctgcagggcatccagaatctttccgcagccgatgcggcgaaggtgctcaacgggtcatgggagatgaccgccgaccgctcgtcgggaaccgatttccgcgtcaaatacgctgatttcgcctcgggctcggtcgatgcggccgttcaaaacgcgatcatcgccgaaggactcgactcctcgacgtacggagattcgggcgttgacggttcgggaaacaccttccaagcaggtaccgtcgatatcgatggatacacgtacaactggcaagtttccgcctgcgagctctctggcgtctattcggtcgacggcctgcccgatacagccgtctacgtcggcgtccgcctgtacagctaggaaccccgcttcgccaggcctccctgccaacgaagcgtcgatcgacgcttcggcctggaaatcccatagccgcaagaaagcgctcgtccgtgcattcgggcaatgccgctatcgttttgcctgaccgtttttattcaattttaagtatagtaataaaccctacccgatgaagggtattttaccttgcaagtcccgtaatccccccgattgcctgccgtttcctctggatgcacgattgcaggagacgaaatgggggtgatcatgaatttctcgaaatacgtgccatatgccgcagcagcgctgtttggcgtgcaagccgtatcccttatcgtccgcccgaccgacgaaatcgtcaggccgcccggtgcacagggagagcgagatttttcgtctcgctgcgtcaagtgcggcagatgcgtgcaagcctgcccgtatgcggcaatcgtgcccgcaggccaaaacgcaggatcggcggtcggctcaccgacactcgacctgcgcaaccaagcgtgcaggctctgccgcgatttcccctgcatcgaagcatgccccaccgacgccctgcgcgacgtttccgccatcgaggatgtcgacatgggctacgcagtcgtgaacgaggatctctgcatagcgcttcaaggcatgcgctgcgaagtgtgctaccgcgcatgccccctgatagaccgtgcaatcaccatagattaccgccttcgcgaaggcgactccatccattcggtgttcgcaccgatcatcgaccaggatcaatgcgtcggctgcggcctgtgcgtcgagagatgcgtggtcgacgagccggaggtcgccatcaaagtcgtgtgcggcgaagatgcgcgaggcgcttgacagggtatctcccccgctaggcggggcaagtatacaggcagtgcaaacaagacaagtgggaggataagcggtatggaaatttccagacgagaattcgtgaaggcgacagccgttgccctagcgaccgcagcagccggcggctcgctgtccatgctcgtggcatgctcgggccaagacgggggcaccgcagcaggaggcgacactcataaatacagcgcggtctgccgcttctgcggatgcggatgcggcgtgatctgcgaagtgaaggacggccggctcatctcggtgaccggagatcccgacaaccaatcgaacaaggggctcaactgcgtcaagggctactatctcgccaaggtgctctacggcgaggatcgcctgactacgcccctcatccgcgacgattcctcgacaaagggaaccgaagcggggctgcgcgaggcgacatgggacgaagcgctcgacctcgtggccgcaaagcttaaggaaacctggaaaaacgacaaatcgcgccttgccttctggggttcgggacaacagcccatcaccgaaggctacatcaccgcgaagctatggaaagcggggctgctctccaacaacatcgacccgaacgcccgcctgtgcatggcaagcgccgtcgtcggtttcatgaacgtattccaaaccgacgagccggcaggctgctacaccgatctcgattacgcagacgtcttcgtcacctggggtgcaaacatggcagaggcccatccggtgctctattcgcgcctcaccgcccgcaagctcaacgatccgggcgtgcagcactacgacctcggcacgctgaaaacccgcacgtcgacgagcgccgacaagacgctgatcttcaaacccggcaccgacctcgccatcgcgaactgcatagcgaactacctcgttgaaaacgagctctacgatgccgatttcgtcgaagaccacctccagttcaaggcaggcaccgaaaacatcgggaacgcctacgaggacggctacgacgcaagcgacgtgggtcaatcggtcgacaaggtgtggaacatcgaattctccgaatacgccgaaatgctcaagccctacaccttcgagtacgtctccgagctttccggcgtagccgtcgaagacctcaaggagcttgccgaagtcttcgccgatccgaacaagaaggtcatgtcgctttggaccatgggcgttaaccagcacaaccgaggcacctggatgaaccacaacatctacaacattcacttgctctcgggcaagatcgcccaacccggctgcggtccgttctcgcttaccgggcagccgacggcatgcggcacggcgcgcgaggtcggaacgttctcccaccgcctgcccgccgatcttctggtggccaacgcgcagcatcgccgctactcggaagccatctggaaccttcccgaaggctatctcgacgagatccagaaacccggattccacacggttaagattttccgcgagatgtcgaagggcaacatggacttcctttggtctgcccacaacaactgggcccaatcgatgccgaacctcacgagattcctcggtaagggcgagcaaacgggcatcttcgacacgttcatcgtcgtcaacgaagtctatcctaccctctcgacgcagtacgccgatgtcgtgctgcccgccgccctctgggtcgaacgcgaaggccagttcggcaacgccgaacgacgcacggcaatcttcgagaaggccgtcgatcctccgggggaggcgaagtgggatctctggatcattctgcaggtggcaagccgcgtgctcgaaggcgagaaaatcgacggcgaagatgcgttcgatcgcctgttcggcttcgtctgggataaaaccgcaggcgatttcaagggagactcccgccaaacaaacgcagacatctgggaggagtaccgcaccttctcgaaccccgatctcaacgagaaggcaaaggccatcaacgacaatgcctccggggagttcgaaggaaagctcaagatggaagcgaagcagctcgcaccctatgaagagtatctgacgaaccacggccttacctggcccgtgcgcgaagtcgacggcaaatggcttccaaccatgtggcgcttcgccaacggatcgcaggaagaaggcttcgacgaggtcggcatcgcccaatacggcgaagagggtcttgcgggcggcatcagcttctacaagacggccaagggaaagccctccgttgtgtttcgtccctacgagccaccggcggaagagcccgatgacgaatatcccttctggttctgcacgggacggctgctcgagcactggcacaccggcacgatgacccgccgcatccccgaactcgatcgcgcgcttcccgaagcacagctcaacgtccaccctgacgactgcgcgaagatcggcgtgtccgacggcgatctcgtccgcgtgaaatcgcgccatggcgaattcgagattcgggtttccacatccggcagaaccgaacctgctcccggcgtcgttttcgcgccgttcttcgcacaggaaaccctgatcaaccttgccgtccacgattactactgcccgctgtcgaaagagcccgactacaagaaaacctgtgtatccatcgagaaggcgtaaggagataccatgaagaagagagtcatcacggcttgcgtatgccttgcagtagtcggatcgctgggcgttttcgcaggctgctcggagcagtcttcccctgcatcgccttcggcttcagcagccgaaggagcgcccgcactgcaacccgccgatcatgacggaaggttcgagcgcggaggctccagcatgtgctacggatgccacggaaacggatcgcttgcaaatccccagcttaccggtgcaacgatcattcccgaagaccactacgccgatggcagctacgattccaaggcgctcgaccccgcgcgcgaccaatgcctcacctgccacccggtttcgtaaggccgccaagaaaggagcaatcatggttatctcaagccttgtcgtcgatgccgccccgggaaccgaacattccatcaccgagcgactcttcgcaatcgaaggcgtcgaagtgcacagccaggaagaaaaccgcctcgtcgtgaccatcgaggcggaaacggtcgacgcgtcgcacgccatcgccagcagcttcatcgagatcgaaggcgtcatgaacatcaatctcgtctatgccaacttcgaagacgatccgagcctcggaaaggtacagggctaaaccatgagcacgcaagcaccgaacaggctccctcgcaagcgctggcttgccgcccgcagaatcgtgcagctctcgatgctgctcgcgttcgccgcggcggttctcgcgagcggatggggcctgttcgggcttgtgcagggcactgacgatcccctcccgaccccaagcgaaacgccgctgtacggaacgctttcgtcatcccatgtagccggactcgatctcctcgaccccttcgccatgcttcaggtagccgccgcatcgaaatccctctcgcccgattggcttctgctcgctcttcctgtcgtcatcctgtatgcagccgtgcgcggacgggcgttttgcggatggatatgcccggtgaacctcttgcttgaaggcgtcgattggctgcgcaagaaggccggcctggaggtggccgagcgaagcgttccccgccatgcgaagctctgggtggcgctcggcgtcatcgtcgcttcggccgcaacctcgatacccgtattcgaagcgttctcgccgatcagtgctgtcaacaaggggattctgctcggaagcgttacgggcctatggacgcttgtcgcggtaatcgccctcgagctgttctggacacatcgcgtctggtgccgcgcgctgtgtccgctcggaggattctacgaggccctcggcagattcggcctcgtcaacgttcgcgtcgaccatgaagcctgcatccactgcgacgcctgcaaagaggcttgcctggccgatcccgagatactccatcccgcgctcgccaaccaggcggacttcgtctgcgcaggcgactgcatggcatgcggccgatgcgtcgacgcgtgcccgaccgaagcgctctcgatcaaggcagggttcgaccactacagggcgaaccgctgatctacacgtcgagcaatttgtgagccatcgcgtaggccacgagatcggcgcgcgttttgagcccgagcttcgcgtagatcttgctccgatgcgcctcgaccgttttcaccgaaaggaagatcagctccgatatctccttgttcgtgtaacccttcgcaagcagctggagtatttcaagctcccgagcggaaagcttcttgtacgaaacgtcgcttccctcttccccttcacccgcgaacagctgtttcgtcaagtttgcagccattttggggtggatgtaggttccgcctcgcacaaccgatctgatagcgccgagaagctcttccgaactcgagttcttgagcacgtaacccgatgcgccgccccgcaaggtgaagtaaaggtattcgggctcggcgaacatggtgacgatgacgatgcgcgtcgctggatggtccttggcaatgcgctcgcaggccacgagcccgctttgccccggaggcatcgagatgtccatcaagagcacatcgggcttttcctttccgacgacttcgtaggcttgcatgccatcggcagcctcgccgacgaccgccatctcgggatcctgctcgatgagcatcttgaatcccgttcgaacgatctcgtgatcgtctgccaatgctatgcggatcacaacgccccctcatccgttcccataggcgcgacaagcgtaaccgtcgtaccctcttcacctgattctatcgtcagcgtggctccgatcagaagcgcgcgctccttcatccccggaagtccgcaacccgatccgcgtatctccggctcctcgacgtcgaaaccgcagccggcatcggaaaccgacacgcgaagccatccccctgcgctttctatcgaaacgccgatccggtcggaatcggaatacttgcatgcgttgagcatcgcttcctggcatatgcggtacgcctgcgtttccagggcctgcggaaaccgctcggttgacagctcgccttcgaacacgatttcggcaccgtaggtcctctcgaagatcgccgcttgcgaacgcagagccgacgcgaaccccagatgatcgagcgcggagggccgcagctccacggtgatgttatgcaactcgtcgaggatcctctcgatgttcgcccccgcctcgtcgataagcgctctttcctcggcgcccatgctcatatcgcgaaggcgcttgagggaaaacgaaaccgaccacagctcctgcgcgatcccgtcatgaagctcgcgcgatatccgcttgcgctcgtcttcttgcgcgccgatgatacgcgtgatttcagaatggggaatcggagcgccgctcttcgccggccttttctcctccacgatcttctcgaaattcatgaagccttcggaaacgacttcgagatcgcacagcgcgtcgcccaaatcgtctatcatctgctggtatacagcaacgtggtttggttcgaccgagcgaaacgcagcgagcagcgatccgaccacccgcccgttctttttgagcggcaaagcgcagaagctcctcaaatcctcggcgaacacgatgggatacgacgagtactcctggggatcgatctcctcgtcgatatcggtgaagagcatcggcttccccgatttgatcacgatgccgccgatgccgtggccgggagcgagcacgatgcgcttgtgtcgctcgcccgtggcgccggcgctgtatatccacttgagaggcgctccgacgaaagcggtcaagccgatggcaacgaaatcgaagctgtagcgcctgcgcagctctccgaccgcatccgtgtacacggcatacccgccggcaagcgtttcttccggaaaattcgatgcggtcatacccctgcctccaacgtccgatcaacgatctcttcccatgataccatttggagcttaaccgtgcggaaccatatgggctggtctagacggtgctcgacggcatagcgcagcaatccaagcgcatctgcgttttcggagcggacaaataaaaaacgcccgaaggcgtttgaaggatttttggaggcgacgcccggattcgaaccgggggtgaaggctttgcaggcctctgccttaccacttggccacgtcgccatgcgtgcatcttcatcgaaaaaggccggccatacacagttatgaatgaccggcccgaatctacgatggagcggacgacggggttcgaacccgcgaccccgaccttggcaaggtcgtgctctaccagctgagccacgtccgcaacgcaaggagatatgatactgaaacccaggggtgagcgcaagccctttttttgaaaaaatcctagagaagtttttttaaaatatcctttgccagaagcgctcaatctggtagtatatccattcgctggcgcgcaatgcatctgcgctgcgtcaaagcgggcgattagctcagggggagagcactaccttgacacggtaggggtcagaagttcaaatcttctatcgcccaccatttaaaagcaagccggaagtcgaatcgatttccggctttttcttttcgtccgatgcggaagctcccgtcaatgcaactcgaaccagctgttgccctctttgccggtgcggtacatgaactcctgcagctcatcggaatcgaataccgcaaggagctctcggaaatcgggaacgagcggatacgaatcgatgtctcccctctttatccaccgcatcttgccctcggcggaagaagaaagctcgcctgagaactcggaggtcttgaacagaagcgcgatgtagcgctcgtcttcttccgattgaaactgcttgacgccgcacaggcggggatgctctatggtgagtcccgtttcctcccatatctcgcgcttgacggcctcgacgaacgattctccgcgctcgacgtgcccgcctggaaacgtcacgccgggccagttttcggcaacgcggtcttgaaggaggatctcgtcatctttgtaaaccatgcaaagcacggtcacgatcgcttgctcgctggccatggcaacacgctttcatcgggtacgcggcggcttttcgccctgattgcaccactataccatcgcccgaatggtcgggtcccaatcccgaaaaacggtagagaaaccgataccaaccttacatgggcggcgcgcctcacgacttcgggagagaaccgatctcgtcttgcagttgaaaccgatgtcggctaccgccctgattgggcggctcggaccagcgcgggtaactcgaaaagcgatcgcaccgtcgcaaacccgcagtcgcccagcgtttcggctcgatcgaggatcaccggcgcaatgccggcatcagccgcgcccgctccgtcagcatcgggtcgatcgcccacatgcatgacctccgacggcgcaaggcccatgcgttcgagggcaatcgtgaagatcatcggattcggtttgcggtaccccacatcggccgatgatacgatctcatcaaagtaaggagccattctaagcccccgtatcagattttcgaggttgggagaccagttcgatacgatagcgagcctcagatgacttctcttcagctccttgaggcacgggagcacgtcatcgtgtatcctccaatacgatggccggcaatacgcctcgttcacatcggcggcgatgccctcggcgtcgtgggcaagccccgtcaggtggctcagataccggtacatatcgagatacatctccaccgaaccttccggcgagcaccagaaatcaccgtcgcgcagatactcctcctcgtagaagcgattcacggcgggaaggcaggcgctcacctcggcgggatcaacctcgtgcccacgcgcagccgcaacctcgcaaaacgttccgtcgatttcggggtcggcatcgatgagcgtggaacccacatcgaaaaacaccgctttgaccatacagcctcctcgccctcgactcagtctcggtggccgtcgtcgggttcgatatggacaagcacttcgattacctgcggatatttgagcttgatcgcatcctcgacctgctcgctcaaatcgtgggccgcgcccaccgtcatgtcctcgtcgacgcatacgtgaagatcgacgtacacctcgccttcggttccccgcgttctgatgcgatgggcctccttcacgccggggattcccatgacgaaggcgttgagctcttcgtcgggaatgcgcgcatgatccgacagcgtcgcgaacgcatgcttgaagacgtcgtaggcggtcgccaatatggcgacggtcacgatgagtgcgacgatgggatcggcagccggaaaaccgaacgaaacgaaaacgagccctacgataacgccgatcgagacgagcgcatcggaaagggtgtggctcgcatcggcggaaaggacctcgcttctgagctcctttccacgcctgcgctcgtagaacgtaacgcccagattcacgcacaacgtcgcgatcatcacgataaacgagaacggtgtcacctcagccgtgtaattttgcgagatgagcttgcccgccgcgctcgagccgacttcgaaagccgcaagcaaaagcaggatgccgattgccaagctcgcataggtctcgaatttcgcatgcccgtaaggatggctctcgtcggccggacgcgaagcgagggcgatgccgatcagcccgatgacgttgcccgccgaatcgaagaccgaatggatgccatctgcctgcatggcggcagaacccgtcgccatgccgtaaaagtacttcgccgccgctacgccgaggttcagaaacaggatgacccacaacacccgctttatcgaccgcatgcggtcggaaacgggcggctttgcaagcatcgccgttttcgccatgtccgatcctttccgtccgagacattcgagccgtccgcttcgcgggcgtatgcgaaaaagggagccgcatggactcccttcgattttctggtgtcggaggcgggatttgaacccgcacacccgtaatgtgggcactagcacctcaagctagcgtgtctgccgttccaccactccgacatatgtattgctcaaaagcaacgttggatattctaccaaaaccaacgcgtttgtacaggatttttttaaactatttagaactatttcgagatcgtgccgtgaggatagatgatcatgagaaccagcaacgacagcaggaagatgaccgcgaagataatcgtgatgcgatcaaggttcttctcgacgatgctcgtacctgtctgcgtcgaatacaccgagctggcgatggcatcggaaatgcccgtgcccttacccgaatgcagcaaaatgaatatgatcaagccgataccggaaacaaccagcagaatcagcgtgacaatcaacaagggattcaaagttctctactcctcaaccgtacttttctgtgtgcgctcacaagttatcgattataaccgcaccctgctcctttacgcaagtaaactttttcccgtcatctccgaaggcgcgtgcagcccaacaagctcgagcaacgtcggcgcgatgtcgcagagggctccccgctcatcgcgcagcgcacgccccgtatccgcatagtcgatcagcacgagcggaacgagcgctgtggtgtgcgcggtaaacggcgttccatcttcggcaagcattttgtcggcgttcccgtgatcggcggtcaaaagcgcaacgccgcccttgcctttgagcgcctccaacactttgccgacgcccgcatcgacggcttcgacagcgctcacagcagcgggaatgctgcccgtatggcccaccatatcgcagtttgcgaagttgacgatgtagacatccgcctcgtcgctttcaattgcataggcaagcgaagatgcgacctccggctcgctcatctcgggctgcagatcgtaggtagccactttcgggctcggcacgagcttgcgcacctcgcccgccttcggctcttccacgcccccgttcaggaaaaacgtgacatgcgcgtacttctcggtttcggcaatgtgatactgggaaaggcctgaatcggcgagcacgtcggcgagcacgttgcctggaaactcctttgcgaaggctatcggcgccgcaatggtcggatcgtattcggtcaggcacacgaacgacacgcgcggacgaatcgcccgctcgaatcccgaaaacgcctcgtcgacgaatgctcgggtgatttcacgcgcgcgatcgggcctgaagttgaagaacacgaccgaatcgccatcgcgcacgccgcgctcgtcgaacgaaagcgggacgaagaactcgtcggtcacatcggctgcatacgacgcgcgcatcgcttcgatgggatcgaccgaagagagcggctctcccccgacaatcgccctgtacgcccgctcgacgcgctcccaacggttatcgcggtccatcgcataatagcgcccgtcgatggagccgatcgctatcgaagtcgcatcggtttcaacgcgcgcgatctcatcgagcagctcctcgatgaagccgatcccgctcttcggcggcacgtcgcgcccgtccatgaagcagtggacgcgcacttcgggcacccccatcgaagcggcgagatcgagaagcgcgtaaaggtgctcgttgctcgaatgcacgcccccgtcggagaggaggcccatgaggtgaagcacggctcccggctcgcttgcctgctcgtacgctcttcggatgacgggattttcggcaagcgatccgtcgcgacaggcgcggttgatccttgtgagctcctggtatacgacgcgaccggcgccgatgttgagatgcccgacctccgaatttcccatctggccgtcgggcaaccccacaggctcgcccgacgcgtcaagcacggttttcgaacaggtttcgaacaccgcgtcgagaatcggcgtttcagcaagcgctatcgcattgccgtctcccggctcggcaagaccgaacccatccatgatgatgaggcacgcgggcagcgtgcacgcgtccttgtccgcaaaagtcatcggcgctcccacaggcaggctttgatgagctggacgaacgtttcggctttgaggctcgcaccgccgacgaggccgccgtcgatgttctccatggccatgaggccgtccacattgccggggttcatcgaccccccgtacaggatgcgcataccctcggcagtttcggcatcggctgcctcggccacggtttccctgatggcggcgcacacctcgtctgcctgctcgggcgttgcggtgcggcccgtgccgatcgcccagatgggctcgtaggcgatgacgcactgcgcgatctcagccgcatcgagcccggcgagcgccgcccgcacctgcgcggtcacgtattcgagcgtcgtgccctcgtcgcgcacggcaagcgattcgccgcagcacacgatggcacccatgccctcggccacaagcgccttgaccttcttgtttaccatctcgtccgtttcgccgaacagctcgcggcgttctgaatggccgacgatcgaataggcgcatccgatctctttgatcatgggaaccgagatctctcccgtaaacgcgcccgacggctcccagtacacgttctgggcggccactttgatcttgaccttatcgaaatcgagaacggttttcgcgggcttgagatctgtgaacggcgtgcacagcacgatctcgacggcttcgtcccattccttcttctcgtattggttggaaatctcctgagtcagaaccacggcctctgcaatggtgttgttcatcttccagttgccggccatcatgggggtgcgcgccatattcatcattcctttcgcttgatacgctttatctgagagcctcgacgccgggaagggcctcgccctgcacgagctccatcgaagcgccgccgcctgtcgagataaaggtcatttcgcttcccaaatcgaatttgtttacggcagccacgctgtcgccgccgccgatgatggtatccgcctcgatgttgccggcaaccgcctgggcgaccgccttcgttccagcctcgaacgccttcatctcgaaaacgcccatgggtccgttccaaaacacggttttcgcctctgcgatcgcacaagcgtacagcttcgccgtctcggggccgatatcgaggcccatcatatcagaggggatcgcgtcggcggaaacggtttccgtcctggcatcttcggcgaacgcgtcggccgcgaccacgtcggcgggcaagaggatcttcacgccggcctcctcggcgcgcgcgagcgttgcggcggcccgctcgatccagtcctcttccttgagcgaagcgccgacttgcttgccttgggcgagcaggaaggtgaagcacatgccgccgccgatgatgagcgtatcgcatttatcgatgagcgcgtcgatcaccttgatcttgtcggaaaccttcgagccgccgagaatcgcgacgaagggccgcttgggatcctcgagcattcccgtaagcgtcgaaacctcatcagagagcagatatcccgcatacgagggcagaagcgaggcgatgcccgcagtcgatgcatgggcccgatgggcggtgccgaacgcatcgtttacatacacgtcgccgagcgcggcgagctcttcgcaaaaggaaggatcgtttttcttctcacgcttgtcgaagcggaggttctccacgagcaaaacctgtccatcctcaagagaggcggctttggcctgggcgtcgggtccgacggtatcggttgcgaacacgaccggcttgccgagaagctcgctcaggcggcgcgcggcggggcgaagcgagaattcgtcttcgaagcccgcgccggaaggacgcccgaggtggctcatgaggatgagacgggcccctttccccatcagatactcgatcgtgggcagagcggctctgatgcgagtgtcatcggtcacttcgccgcctttgagcggaacgttgaaatcaacgcgcacgagcacgcgtttgccggcgacatccgccgattcgagggttttgatgtcggacatggaaatcctttcgatactgcaccgataccactgcgggactacggtgttgagtgcccgcacatagaacgaccgcccgggaaatccccgggcggtcgcgtattctgctagagcatgatcttggcaagatccttcacacggttcgaatagccccactcgttgtcgtaccaggagatgcacttggcaaacgttccctggccgcccatcaccatcgtgagcttgctgtcgaagatcgacgaatgggaatcacccacgatgtcaaccgagacgatcggatcctcggtgtactcgaggatgcccttcatcggaccttcggccgcggccttcatggcggcgttgatctcttcgatagtcgcctcgcgctcgagctcgaccgtgaggtcgaccatcgatccgtcgggcgtgggaacgcgggttgcgaaaccgtcgagcttgcccttgagttcgggaagcacgagcgacaccgcgcgagcagcgccggtagtggtcgggatcatggagagggctgcggcgcgggcacggcgcagatccttgtggggaagatcgaggatcttctgatcgttggtgtaggaatggatcgtgttcatgtagccgcgcttgatgccgaaattgtcgagcagcaccttcgcgaagggcgcaaggcagttcgtcgtgcaggaagcgttcgaaacgatgttgtgcttttccttatcgtaatcgccgtcgttcacgcccatgacgatggtgatgtcttcgtttttagcgggagccgagatgatgaccttcttcgcaccggcctcgagatgggccgcagccttcgttccatcggtgaagaaacccgtcgactcgacgacgatgtcgacgccgagctcgccccagggaagattggcgggctcgcgctccgagaggaccttgaccgcgcggccgtcggccacgaaaccgtcttcggtcacttcgacggtatcgaatgcgcgtccgtggatggaatcgtacttcagcaggtgagccatggtcggaatgtcgcccaggtcgttcacggcgaccacttccagctcgggatcgttcgccatcgcgcggaacaccagacggccgatgcgaccgaatccgttaatacctaccttggttgtcattcgtatcccctttcaataaagatactcatcaagccagcagtcttggagcaatggtacccttgcggattgccgagcctccataaccgcaggcattcccacaaaaaaagcatccgcaaagggaggcttcgcagcccgggggatcacctccgtgccgcctgattcagtttactctcccagatccttggccatctgctcaatacggcgaacgcgatgatacaccgccgatttggacaggggcgggttcgctttctcgccgagttccttaagcgttgcgtcgggattggtcacgcgcagcttgatgaactcctgcagcgcgggaggaaggttctccatcccgtaggcgtccaccaccttacggatggcgaatatctggtcgaccgatgcgttcgccgccttggcctggtttgcgatctcggcgttcgtgatgcggttcacatcgttgcgcacgctcttaatgacgcgctcgttctccatcgacagcgcgctgtggtgcgcacccacgtaagcgaggaactccagtatcgcggttccgctcttcagatagaccatgtacgagcttctgcgctgcatgacgcgtgcggagattcccttattcgccatgagttcgacaaggccatcggcaaggctttccgattcgaccgtgatctcgaagtggaaatcgccccgggggttggagatgaagccgcttccgaggaacgcgccgcgaaggtaggcggcggcgcagcactgcttctcgacaagctcgtctgcaatgcccatctcgagcccttcgccggacagcacgcccatatcccgcaaagccggttcgagcctgggctgcgtgggcacctcgataaggtagttcggcgtcttgtgaagaacgctgcggcgcacggtgaggttcgtcttaagctcgtagatgccatggagaagcttgatgaccagccgggccacgctcggcacatcggttgcgatctcgatgcggtagcgacccggcccgctgaagaacaacgtgccctcgatgcgcacgagcgcggcgagggtcgctttgtcgcagtggctgcacatgggtgccacgcgtgcgagctcgtcttttacctccgcggtgaacgacacagcctcatcacccccgcaaacgccgcccgaagcgcccggggatcgtgccacgtgggcctgttcggatcgacgaggttgcgtgcgacgaccaccggtccccgctcctggataacctgaatgtcggcatacgaaaccgatacggggcgaacgcgacctgaaagccgggcgtcgccgagatcggacagcgacgacgacccgtcgctttcgccgaccgccgcgttgtagctttccgaaagggcgtcctcgggcctcaaaggcgcaggggcatgcaccagcacgtagtcgagcaggccctgcatgccgtgttccataagggcttccacatgctctttcgcagaaaggccccatgtctcgccctgcatgtcggcaagcgagcacacgaacagcgtccgtcccctcgatgcgcggatggcatccacgatgcccggcacgagcaggttcggtatgatcgaggtgaaaagcgagccggggccgagtacgatcaggtcggctcccttgatggcctcgatcgcgggatgatagggctcgggctccctgctcgcctgcagccacacgtattgcagcgccgttgcggatcggcaggcgttggcctgccccatcaaccgtgcgccgtcgcgcgtttgggcgcacagcgtcacgcggtcgagcgtcgagggatacacatgcccccgtgcgtcgagaagcttctcgcaaatcgatatggcctcgggaaacgatcccgtcgcatcctcgagggccgacagcatgaggttgccgagcgtgtggttccgggcgaattcgaaacggtacttgaacgcgcgcgtcatcggatcgtccgcgtccgccgcgaacgcggccaggcactttcgcacatcgccgggaggcgttacgttggcctcttcgcgcaagatgccggtcgatccgccatcgtcggccatggccacgacggcgctcgtgtcgaaccccatcgaaagcaatgttcggatggaaacgggtgcaccggttcctcccccgatgacgacggcgcgaatgcgtttgtcctgcggcacgaacggctccgaaccgctgatcgccgcgaacgccgcggtgttcgagggatcttggctgaagggatggccggtcatttccgaccccgtcccgccttgcccgtctcggcgagcgacagatcgcggtgcgcgatgctcacacggtagcccttggctttcaggtactcgcccgtcgcctcggcgagggcgacgcttctgtgctggcctccggtgcagccgatcgcgatggcgagctgctgcttgccttcggctacgtatccgggcatgacgcaatcgagcagcgagcgccatttcttctggaattcctcggtttcgctacgatacatcacgaaatcgcgcacgggggcatcgaggcccgtcaggcccttgagttctggttcgtagtacgggttcggcaaaaagcgcacgtccatcacgatatcggcatcgagggccgcaccgtgcttgaagccgaaggaatacaccgtcacagtgagcgccgcccgctcgtcgccacccgagaaaagcgatcgtatcgcgcttttcagctcctggggaagcatgtcggtcgtatcgatgatttcgcttgccgaatctttgatagagctgagcagctcccgttcccgctgaatgccgcctccgatcgtgatcccctcgccgcacaggggatggcggcggcggctcgatttgtaacgggcgatcagcttgtcgtcgtcggcatcgagaaacacgagccgataggcgacgccccgctgcttgagatcatcgatctcgcacatgagatccgaaaagaaatcgcggttccgagcatcgcagaccactgcgagcttgcgctgggcatcgggctggcccggcatgccctcgagcgcaagcagcgtgccgatcatgctggccgggagattgtcgatgcagaagtatcccagatcctcgaatacatgcattgcctcggtgcgccccgccccgctcataccggttacgatgacgagttcgggcatcgcggggctctgatcttcgcagggttgtccgatatctgtttcactgctcataacgcactcctgatatgctcgaatggcctggccttctttgtttcacgcatcttctcgggcgcccccttgcggctcgcccggtgcggcttcgccctcgacggcgcgatcgccgctcacggcatcgccctcgacgctccgcgaggcggagagctcggtgttctctttctcattatactgccgcaggaccgcatacagctcttccgcaacttcttcaggaacggttcgcgtcgccttgatttcgtcgaccgttgccgctttgaggttcttgaacgatttgaacgccttcatgagggccttcttgcgcaccggtcccaaccctaccacatcgtcgagcacgctggccgtcattcccttgccgcgcagctcgcgatgaaaggttatggcgaagcgatgggcctcgtcgcgcacctgcttcacaaggtaaagcgatgccgaaccgctcgggagcaccaccgggcccgtgtcctgccacggcacaaacagctcctcgtcgcgtttcgcgaggccggcgagcgcgatatcgtcgatgccgagctcgccgaacatctcgatcgcggccgacagctgcggcttcccgccatcgaggatgatgagatcgggtttgctgccgaatcgctcgtcggccatgcgttcgggcgcatagcggcgtccgagcacctcctgcattgacaggaaatcgttcgcctcgtcaaggggcgtcttgatcttgaagcgtcgatactggttcttgtcgggcttgccgttggtgaacacgaccatggaggccaccgtgtagcttccatgtatcgtcgatatgtcgaagcactcgatgcgcatgggaggctcgtcgagcgcgagggcgctttcgagctgcagcagcgcctcgttgatgcgcttgtcctcgtagttcgtgcgcaccttgtagcgcatgagcgcgtgtttggcgttcatttcagccatgtcgagcagatcggccttctcgaccttcaacggcgccgtaatgcgaaccttcgcgccatgggggcttgcgagcttctcggtcagccattcctgcatgaccgccgtatcgtcgggttcttcgcgcacgatcacctcatggggaatcgaggtcgtcgtatcgtagtagcgcagcaagaagacatgcacgagatcttcgtcgggaacgtctttgcccttgttgagaatgaattcgttgctgttgatgatgcggccttcacggatcatgaacacgttcacacccgctatcgtctcttcgcggaacacgccgaccacatcggcattgaggttgcgcgaggacaccgcgtgctgccgatcggtgagtgagttgatagtctcgatgcgggatttgatgcgaccggccttctcgaaatcgagcacctccgccgcttcgcgcatttcctcctcgagctcttcgacgaactcgcgatgggaacccgcgaggaaacgctcgatgcgcttcacgttgctcttgtactcctcgggagcgatgcctccgcagcatgcgcccggccccaatcccacatgcgcgtcaaagcagggcttcacgccgtcggagccgagaaacgcggccagatcctcggtttcgagcttgcgcttcatacgtcgccaatcggcgcatgaagtcgagcacaagggaacgacccgccgggctatatcgaccatctcgcgagcggcgcggctatcggtgtaagggccgaaatacctggtgtccgcacgatgcttttcacgggtgtatttgatggcgggaaacacatctcccttggtcaaagctatgaacggatagcttttatcgtctttgaaatcggcgttgaaatacggcgagtactggttgatgaggtttttctcaagaaccaggctctcatgttcgttttcggtgacaagatagtcgaacgattcgatttgatcgacgagcagcgggattttcgcccgatcatcctggtagttcacgtactggcgcatgcgcgcgcggagctgcttcgccttgccaacgtagatgacctgcccgtctttgtccttccagaggtacacgccgggaagcgtcggtacgctgttgagttcgtttttgatgcggtcgagtttatccatgcgcctagtatacgatatcgcgcaaacatgcgttcacgtttccatcataggaacgcggggcgccgaaggcggcgccccgcacagcaagtctcacccgcactcgcgccttccgcgcaccccgatgccgccgcaaagcgtccctgcgtaagaacatcgttcattctgcgggagagggttacgaacagtatgcagctgcgaggttggcgatggcgggatagaacacggtgcgagaccccgcccctacacgctcggcgaaggtttttgcccatgtgcccaagtgctcctcgatgaaacgcgcttgggcgctctggctctccagtgcctcctcttcgctcccgcgctcccaaaagtcggcttccgcaccggcaagacgcgcgaggaattccaattcgatggctatatggtcgggaagctcgaccaagggctcgggcacggcaaacccgcttttccgatacgcggcagcgaccgcacgctcgtcctcagttcgcagcctgcctcccccggcctgcctcgcctcgctcgcatagtagctttcatacggtggcgcgagcaacgcccccggtccgacgaacagccgattgtaatcgacttcgaggcgcaggcggatgccgtcgacgggcatttccgcgcattccgcctcgaatgcctcgatcgcgccgacgggatcgaatgcgcggtctcctgtttcgcatgaaagcaattcgcgcagcctgatcgacaccctgccttccttcagcaaggcggcaagcatttcgtcgggccgctgaaggcatcggcagaatagcccgaagaactcggcttcggcacgtgcgaaccctgctttctcatgactctttggcattcttcttccttcctcgcgtcgactcgccggagcaccaagcacctgggcaggcgaaacggcctcctgacgttgcagaacccgctcgacgcgccacgccttcccggctatcggttgatcggccggtagccgggaaaaagatttaacatgcttaaccgatccgctcgcccctagctgcccatcgaattccagtaataaacctgaggcccagtgccttcggcttcaagaatgtgcttcgtttcatgctcggcgatgatcttcgcgatatcggaatcggggtcgtcgatgtcgccgacggtaatcgcacgtccaggacaggagatctggcacatggtggtacccaatccggcatcgatcctgtgcgcgcacaacgtgcacttgtcgaccgtgttcgattcctcgtcgaaaacgcgcgcatcgtaagggcatgcctccatgcacgacttgcatcctatgcaggtttccttgtcgatcgtcacgatgccgtcttcgcgtttcaccgtggcacccgtcgggcacacgccgacgcatggagcctcatcgcagtgctggcaaggaacgggagtccaggtcatcgtgagattcggatacgttcccatcggagtatcgtagacagccctctcctcgtcgttgagcactcgtatacgcagaagcccgtcggcaacgccgttctccattttgcagccgatcgagcaggtgcggcatccgatgcatcgatggaggttgattgcgaacccgtatttcgtcatggctcaccacctatgcctttcttacttcgacgaggttatcgtagggggcgaaattcgtttccgaaatcgcatcctgtgcgggattgagcgtcatctgaatgagcgcgctgtagtgggtttcctcggggaagtccttcggccaccatccctgccgctgattgaggcatccgggcttgatctccggggtcacgagcgctttgaccttgtacgagccgcgatcgttgaacacctccaccacatcatcggtcgctatgccgcgcgcctcggcgtcttcaggcgagatctcaagccatggttcgggcgcgacttcgcggatccaaggaagctgtacgtgctgggaatgcgtcgtgtacacggtacggcagttcatgaacgtaagcggatacacggccgcctgctcattgcggtttccctcgagcggctcgtagtggcaggcgagctcctcgccgaaatcggtgagaccctccgcgtacagctcgatcttgccgctcggcgtctggaaccgcatgctctcgaacgccacgtagttttccggatagttagccctcacgactttcttttccatcagctcttcgaaatcgatggaagcgaactcgggggcaacgctttccttgaggatatgatcgcgcccgtactcctcgatatcgagcctccactccgtctcctcgagtatgccgaagcgttcggcgagcatctgcgcaatctggtagtcggtcttcgcctcgaacatcgggctgatcgcttgttcgcgcacctgcacgtacatcgacgaccatgccgtcacgatctcgaaaggctcttcgtaatagcttgttaccggcagcacgagatcggcgtactgggcgccaggcgtcatgatcgaatccgatacgatgatgaaatcgagttgcggcagcacctcgtcgatcatgcggttgcgatcgggcccctgcgtcccccaaccgtagttctgcgtccaaagaagctttacgggataaggtttttgcgaggcgacgatgtcgtaccactgggagccgggttgcggcgtcgaagcgtgcccctctcgcggcgtcacggccgacggccccagcgcgaacagaatgcgcatgaggctgccgcccgcccaattgatgtttgcatggggctttccgatgttgcccgtaatggctgcaagctgcacgagcgcacgcgtcggcagatgaccgttccagtagcggttcgtcccctgacttacccgcaagcacgccggggtctcatcggtatacaggtcggcgagcgcaacgatgtcgtcggcgggaacttcgcagatcgcgctcgcggcttccggcgtatacgcgtcaagggattccacgagaagctggaatgacggcttggcctcgacgcttcgaccgtcgacttcgacggtaaacgcccccagcagggctgccgtcttcggcacctccgtctctttcggaaggtctcccgacacctgcaccgacggataggcgggcttcatctcgtcgggcacggcggccaccggcacggcttttccggctgattcatcccagacggcgtaatcctcgccgatcctgacgagctttccggtctccgtatcgacgaggaaggcgccgttcgtgtacgttctgatataagcctcgtcgtacttcttatttgcgacgatgtggttcatcatgcccaacaccatggccgcatcggtaccaggtcgaataggtatccaccgatcggcttttgccgccgtgcgggaaaagcggggatcgacgacaacgagcttgcttcccgcttcctgcgcgtcgaaaatgaagtgcatttcctgcatgtttgtttccgcgtagttgcagccgaacatgattatggccttcgaaccgatcagatcctcccaggcacttgcatcctgctgcacgccgagcggcggcagaaatcccatgttgcaggcgttgtctcccatgatgccgaagttcgtgaacgccgttccgtcatacgtcatggccaaaagcgaagccatgatctgcgggaacactccgtagtttccggtcatccccaaaaaggagttcgccgtcggcccatacgtgtcgatgttgtactgcattttctcgtagatgagatcgatcgcctcttcccagctgatgcgctcgaaatcgcctgatcctcgctcgcctacgcgcttcatcggatacttcacccgatcgggggaatagacgcgctgcatcgcattcgatatgccgcgcaggcatatgcgatggtatgcgttgtcgggaaattccgccggctccaccttcacaatcgtgtcatctttgacaaacgcgttgatcccgcagctcccgacgcagttcggtgcgcatacggtcctgacgatcttgtcgtaatcgggctggcccgtcccgctcggcacgttcgaatcttgctgaggctgttcttcctccggagcgcacgaagcgagcatcggcacgctcgccgtgcccaccgcgacgcccgcggcgagcttgaggaagcttcgccttttcatggcgagccactcgttgttttctcggttggttttcgacatggatccactcctctcgtagtgcatcgtcaagctttccaggggtcgttggaaatctgcagctttccagctgaatgcgagcgcacggattcggaccgatgcccgtcggtttccgatcccttattgcgttgtcgcattgcttttcccttgccgtcagtatagagcgggaagaaagacgcggacttcttttgcgggaacttccgaaacccgcaagacgatcggaaaaggcgactacccgagagaatcccgatcgactgctatttccggcgttatgcgcttcccgatgccctcaagcacgtcgaccgcgcgctgcgccacgaacagcctcccgcgctgaaagcgatcgagcgttttgacaacagatcttcgagcgccgaccctttgttcggcttgccgaaatcatcgagccacgattctttgagccgcaatatcgcgtcgaggtacatatccgccgcacgcgccgacacttccgccgaaagcgcgcagaaaccaacccattgatcgatgaattccatccggttctcttcggtgatggcgcacccgaaattgtacgggagcaaagagcgcgcgtggctcggcgtgtcgatggcgggctcgaggccgatcggcgcgatgatgctgttggtgagtcctcggcgatgcaggatcgcatggcacatgagccgaccggttttatccatgcccgatttgaagggcttgatgctttcgaattggaaatgggcaagcgcagcctgtgtgatcggactgtagacctctcttccgttgaataccatgaggtcctcgacgagcgcttcgacggcagcgggcgcgggcggctcgtaaaccttcgatgcggcgacggcctcctccgacacccacgctttccgcctgatcccgacaccgctcttcgccgcaacgcagccgaaccgggcaagcgaatggatgtcgagcaggtagctcacgttgaaaggctccgcttcagccgtgcggtagatgtgctcaagagcccgctcgaagaacagaacctcgacggccacctgacgttcttcctcgtttccgaatccgtagaaatcgaacgggtccccccgacggatcggctcgtcgtcgccctccgccgcgcatgcttcaagctgaagcagggccgcaagccttggcgtcttcccttcgatgcgaatcgtcgaaatagcttcgagccgcgataggacccgcctcaacgagccgccgacgtgcccgtggagcgccctgtcttccatgcggaccaaagcccgctcggcccgtgcggtgttcgcctgcgtttccggcgatatcgcaaaccgctgattgctcatgacgtccggcgtatacacgatcgctcccccttatcccatcccgaggatcgcatgccttacgcaaggctaccttcttccgcgccggagggcaatggttttgcagcttttcggatatcgtgcaaaaccgccctgaaggcgcggcggaccggatcgcccgcttaaggcaccgaagccgcgtaaaacggcaatcgcatcgaagtctctgtccgccggcaggcatattgtttcgtcttctttaaatcttggtttcgcacctgtgaacctccgtataatggaaaaatccgtacaaccccataaaggaggtcctttgatgagttatgtcgataacgtcatcgagcaggtcaaggagaaaaacccgaacgagcccgagttcatccaggccgtaaccgaggtactcacgtcgctcaagcccgccatcgattcgaatcccgcctacgagaaagcaggtcttctcgagcgcatcgtcgagcccgagcgcgtcgtcatgttccgcgtgccctgggttgacgacgataacaacgtgcatgtgaaccgcggttaccgcgtcgagtacaacagctgcctcgggccctacaaaggcgggcttcgcctccatccttccgtaaacctcggcatcatcaagttcctcggtttcgagcagattttcaagaacagcctgacaacgcttcccatgggcggcggcaagggcggaagcgacttcgacccgaagggcaagtcggacatggagatcatgcgcttctgccaaagcttcatgaccgaactctgccgccacatcggcgccgacaccgacgttcccgcaggcgatatcggaaccggagcccgcgaaatcggctttatgttcggccagtacaagcgcatccgcaacgagtgggtgggcgtgctcaccggcaagggcctctcctacggcggctcgctcgtacgcaccgaagccaccggctacggccttgtgtacttcgtgcaggaatacctcaactgccatgacgattccttcgaaggcaagaccgttgccgtgtccggttcgggcaacgttgccatctacgcaaccgaaaaggcccagcagctcggcgccaaggtggtcaccctgtccgattcgaccggctggatccacgaccccgcgggcatcgacctcgcactcgtcaagcagatcaaggaagtcgaacgcgcgcgcatttcagaatacgccaaccgcaaagagggcgtcgaataccatgacggcaagggcgtatggtcggttccggtcgacatcgccttgccctgcgccacgcagaacgagctcctcatcgacgatgcgaagaagctcgtcgcaaacggcgtgaagatcgtcgccgagggcgcgaacatgcccaccaccatggatgcaaccgattacctcatggaaaacggcgtcgtgttctgtcccggcaaggccgcaaacgccggcggtgtagcaacgtcgggccttgagatgagtcagaattccgagcgcctttcctggacgttcgaggaagtggatgccaagctccaaggtatcatgaagaacatctaccacgccgccgacgatgccgccaaggaatacggccacgaaggcaactacgttatgggcgccaacatcgccggcttcaagaagctcgccgatgccatgatggctcagggaatcgtgtaaactcacagcacattccgcacatccgaagcgctcgggctcgccacggcagcccgagcgctttcgttagcgcgggctcggctgcgaatccctgattgtgtgcatatcctgcaatggggttcggactgcggctttttcgataggattgtcttttaccgcttcgagtcattctcggccgaatgccgcacggggcgccgcacgatggaggtactggatgcaccgcacttcgacccgactgctctgcgccgcagcatgcgccctcgccttcgcgcttctcgccctgcccggctgttcgggccccgaggccgaacagccggaagaaccggcctacgtcagcccctacgactggtcggggcttgccaaggagaacagccgcttcacgtattcggaaggcggaaagatacgctcgcttgcgggcatcgacgtttccgaacatcaaggcagcatcgactggaacgccgtcgcatcggacgacatcgatttcgccttcgtgcgaatcggcaaccgcggggcaaccgaaggctcgatctaccttgacaagcattacgaggagaacatggctggggcggcaaaagcgggaatacccctcggcgtctactttttctcgcaggcgatcacgcccgaagaagccgaggaagaagctgatttcgtcctctccgcgcttgggggcgccgagctgtcctttcccgttgtctacgatcacgaacccgtttccggcatcgagggacgcgccgacaagctttcgcgcgccgagcgcaccgaaaacgccgtcgccttctgcgagaggatatccgccgcagggtacgagccgatgatctacggcaacaagcgcgatatagcctggctcgacatgtcccgactcgaaggcatcgacgtatggttcgccgaatacggtgtcgaaacgccctcgggacaattcgatttcacgatctggcagtacgcaagcgatggcaccgtggcaggcattgccacgcccgtcgatatgaacattctcttcatcgcagaagatcagtagccgcgaaggcacgaaaggacgaacgacatggaagaatccagccccgccgcccacgcaaccaaccaaagcggcaaggacggcgcccagtcgggcgagccggtcagcgacgttcccccgatcaaaaccgatcgactgcttctgcgcgcgttcgcacccgctgacgccgaagcggtcttcgcttattcaagcgacccccgaatcggacacgatgcgggatggcccgcgcatcgctcgctcgacgattccctcttcttcatccgcgacatagcctcgcaggggcacgtatgggctttggttcccaaagagacgatccgccctgaaacgcctcagggtacgcccatcggctcgatcgggctcatcgccgatcccgcacgggaatacgacagggttctcatgctcggctatgcgatcggcgcagagttctgggggaagggctacacgaccgaagcctccatggcggtcctcgcctatgggttcgatgcactcgagctcgctgccgtctcctgcacctgctacccctggaacaaagcttcgaagcgcgtgatcgacaaatgcggattcgaatacgaaggatgccgccaccttgcggaaatcggccaagacggcgtgccggaagatttcctctgccacatcctcaccaaaaagcgctggctcgacacctgtcaagccggataagggccttatcgttttcacccggcagcctgcgtccgcgattccgcataacggggcttcgcgccttagctcgactgcatgactttggctgaaacgacgttgctcggcgatatgaggatgatcccagccgacccgagctgcggggcgttcacgtaaaacgtcccgttgatcgtctcgcccatgacgaacagcccctcgtcctgcgtcgatatgacgatgtcgattccggcgacatcctccaagatctctttgtcgggcgtgagcgccacgatgaagtcgacattgtacttctcgaagtactcgacctgctgctcgatcgccttcttggtcatacgcggagtcacgctgaatatcccgaaccgatggtcgcccttcttgaggatcgtcccttccaggtatttcccgaggttttcggaatcgatggtgaacaccgtcgcatttttgtcgaggtagctctgttcgacttcggtgatatcgatcggaatcttcttcttggcagccgacgaggagccgctcgaacccgatcctggattcggattcgaacccgtcgagtccgaacccgcgcgcgcatcgtccttcaggccatcgccgcctgccgcatgccccctacccgattccgccggatcggctgcattctcgccatccccatcgtccgataagggatcggaggaaatcggtttgcgatcggatccaagaccgtccgcgcccgaagcatcggtcgccttcttcgaccgctcgagacccgacaagcccgactccacgtcatcggcaatctcttccgctgtatcggattcgcctgtttcgcccttgcccggcttcgcgccggagccgtttttttcagcagcttcgggatcgaccgttcccttgaacacgatggcggtgtagccatccatgcgtcctgccgcatcatcgatgttggaggcggcgacgttccatgaatggccgattgccaaatagccgatgagcccgcaaagggaaacggctatcagcccgacgaatacgacgagtgcgattttttcacgtgatacgttcgacatggtgcgctttattatacctgcgtcgaaaccgcaggtttcggcttccgagcaagcgacacaatttcagagcaaacggaagatgcgcccgctttcccttatcgcagttccgcgaaatgcagcggcgcctcggcagcaggggcattgcgcccccgcaccgtcttctcgtacgcatagcgctccggggtcgcaccttcggcatggctgatgtatatggttccgcacttcgtgaaaccgcttttttccaaaagcctctgcatggggacgttgccgggatgcgtatcgatgcgcacgctcgcacatccgagttcacgggcaagccgtaaagcgtaatcgagtatcgaagcgccgatgccgttgttcttcttcgcaccggtcaccgcaacgcggtggacgacgacgtagcacggatcgtcgggaagtgattcggtcagccacgacccgccttcgatatagcggtagtcgaactcgtcacggcaggcgaccatcgcagtcgcaacgagcatatcgccgtcggccacgacgacgccctccctgcgggcgatatcgctctcaatgacctcgcgggcaggatagcctccctgccactggtcgattcccaaagcagctagagcgcttcggccgtctgcaagtatatccatgatgcggtccagatcggagaactccgctttcctcagctccaataccgtgctctttctcttgataattccagcgaacagaaacaatagcaatcggcgaaggcggacacaatgatttttttcgagatcttgcgctctcttcgaaaaaagctaaccagacaacgtggaaaaaattcggaaaacaacctagagcagcttctcgaaggcgattcgacgcttttcccgcccgaagtagtctctgacaacaatgctgccgcgctccgaataaccgtacttctcgagcagcgcccgcatcggttcgttctcggggtagatgtccgcgcgcagcgatgcccttccccgcttgcgcgccaaccgctccgcatcgtcaagaatgaaacgtcccacgccgctgcgccgagcatcggcggcaacgttgacccagtggagcaccgcgtattcggcttcgccgaattctttcgatgtaagccacgttcccgcaaagggtttctcgtactgagcatcggggctgaaggagacggcgtacatgccgatcggcaccccgttccgatcctcgatgatatgcgtggtcccgtttttaatgctgtgcatgaggcggcgcggcgaggggtacttcttgcggccttcggcgatgccgagcttcttgaaggcatcgtggccttcgtcaagcagccgcatggccgtcgggtaatcctcccgcccggccacgcggctcgaatagtatccgagcacagcggcgggacccaaaaacacaggcggctccgattccttctcgtgcgccgattccgatgagggcagagcatcctcctcgcgctgggttaccaagaacaccatgccgaggatgagcgcgcatccgatgatatcgaacaccgtaacgggcgtaccgagccaaaccgccgaaatgaccatggcggaaaccggctccacgcagcagagcagactcgccttcaccggacccgcatcggtgatcccctgcaggtagagcatgtaggcgccgagcgtgccgaccacgatgatggcggccatagcggcaaccatgcccgcctcgacatgcaccggtatcgtccatggccgcacgaacaacgtcgcggcaacgccgccgaacgtcatagcgaggccggttaccacaagggagccccacttcttgagcacatgcgcgggcatgagggtgtaaaacgcgagcgcgagcgcggcgaccagaccccatgccaaaccctctgccggtatggcaaggctgccgatgttgccctgcgtcgatatcgccaccatgccgatgagcgcaagcacgaggcccgccacttcgcgcaaacgcggaagccgccgcgtcctcaggcacacgtacagcatgatgaacacgagtccgatctgctcgagcatggttcctgtgcccgcatcggtgtatccgatgacaagaagatagctgacctgcgtaaggagaacgccgaacaaggcgaaggctgcaatggatatgagcgaacgccaatcgcggaacaccgcgacgagcctgccccaatctttcaccgccgtcgccaagaggaacaacccgcccgcaatgagcatgcgaatgcaggttatccaaagggcgggaacctcgtaggtcgtcatgagcagctgggcgcacgtacccgaaaacccccagagaacgccgccgagcaaagcgcatacgatgcccctcatcacatggttgccccgcacggccaccgcccgtcctttcatgttgtttcacgctggagccgacatgccccgaaaatcggcagcgagcattgtcgcacgcggaaaccctgcggtaaagccgctcgcgcaacttttcatgatcgccacaatccggctgcgcgagccgatcgggcaaacgcaatgaaaacggtcgtcggccgcccaaaagcggcaatggcaccggacagcgtcgatccgaattccaaaaaacactcgaaagaatccgggtcgactcgaagctcccggaagggaaaccttccgggagcttttccagcatgcgctttccgctacgaggctttgctcttcggtttgccatccgaagcgtcgtcgagcaccttggcaaggaagctgcccgtatggcttccgggagtcgctgcgatcttctcgggcgtgcccgtcgcaacgatcgtgcctccgcgatctcccccctcgggaccgagatcgatgatgttgtcggcgcatttgataacgtcgaggttgtgctcgatgacgagcacggtgtttccggcttcgacaagcctctgcaaaacctcgagcagctgccgcacatcttcgaaatgcaacccggtcgtcggctcgtcgaggatgtagaaggtctttcccgtctgcctgcgctgcagctcgctcgagagcttgacgcgctgcgcctcgccgcccgaaagagtcgtcgcaggctggccgagcctgatgtagccgagccccacatcatggagagtctggagcttccgcttgattcccggtatgttctcgaagaatgcaagagcttcctcgaccgtcatctcgaggatgtcgtagacgttcttcccgcgatacgtgacctgcaacgtctctcggttgtaccgcatgccgccgcatacctcgcacggcacgtacacatcgggcaaaaagtgcatttcgatcttgatctgcccatcgcccttgcaagcttcgcagcgaccgccgctcacgttgaacgagaaacggcccggcgaatacccgcgagccttcgcctcctgcgtcgatgcgaagagctggcgaatgtcgtcccacaggccgatgtaggtggcggggttcgaacgcggcgtgcggccgatcgggctctgatcgatgttgatcactttgtcgagcaactcgcacccggtcatcttgcgatacgctcccgtgcgccgacgcgcatggttcacgcggttggcgagagcaggcgcaagcgtatcggtgataagcgagcttttgcctgaaccggaaacgccggtcaccacggtgagggcgccgatcggaatctcgatgtcgacgttcttcaggttgttctccgtcgcacccaaaagcttgatggcgccccgtttgggactgcgccgttcttgcggcacctctatcctcctccgcccgctcaagtaatcggcggtataggagttcttcgccttgaggatctgcttgggcgtgccttcagctaccacctcgccgccgttttcacccgcaccgggacccatgtcgataacgtaatcggcatgcctgatcgtatcctcgtcatgctcgacgacgataaccgtgttccccaggtcgcgcagacgctcgagcgttgctatcaaacgctcgttatcgcgctgatgcaggccgatcgacggctcgtcgagtatgtagagcacgcccatgagcccggccccgatctgggtggcgagcctgatgcgctgcgcctcgccgcccgaaagcgttgccgtcgcccgctcgagcgtgaggtaatcgaggcccacgtccaccaaaaagcgcaggcgcgccgcgatctccttgacgatgggccccgcgatctgctcgtccgatccggtgaaggaaagcccctcgaaaaaggcaagcgaatcgacggcgctcatctcggtcacttcgtgaatgtttctgcctccgaccgtaaccgcaagtatctcgggtttgagtcgcttgcctccgcatgtctgacagggcacgatggcgaagtactgggagtacttctcgcgctgattgtcgctcgtcgattcctgatagcggtgcatgacggccgcgcatgcgccctcccaatcgatgtaccagtacgtctcgcgcccgtcaaccgtcacgtaatcggcacgcaccttttctttaggaagcccgtacagaagggcgtcgcgcacttttttcggcatgtcttcccagggggtgtcggatgatacgcccatatgcttcgccacggcgcgcagcacctgcgggtagtagtttcccgtagtgaacggcgcaatcacgccctcatcgagcgagagagacggatcgggaacgagcaggctcgcatcgacctcttccctgctgccgatgcccagacaatcggggcatgcgccgtaaggggcgttgaacgaaaagtcgcgcggctgcagttcgtccatggaatggccatgctcggggcaggcaagcgcaagcgagaacacgtactcgccctcctgcagaccgcccgtagcgcccgacgaggtgggtccgcccgccgccttcggcttgccgtcttcgccgagcacttgcacgagcacgcgtccatcggcgagcttcgtagccatttcgacggcctctgcgatgcggctcaccgcatcgcgcttgagcacgacgcgatcgacgaccacatcgacgaagtgcttgatcttcttattgagcacgatgggttcgccttcgagctttcgcacctcgccgtcgatgcgaacgcgcgagaagccctctttctgcaaatcctggaacagcttcgtgaattcacccttgcgccccacgacgaccggtgccatcacaagcgctttcgcgccctcgccgatcgagagaatctcgtcggccacctgatcggtcgtctgcttcttgatctcgcggccgcattccggacaatggggaacgcccacgcgggcgaacagcaagcgcaggtaatcgtatatctcggtcgtggtccccaccgtggaacgcgggttcttgctcgtggttttctgatcgatcgacaccgccggagacaggccgtcgatgctatcgaggtcgggcttgttcatctgcccgaggaactggcgcgcatagctcgacaggctttcgacgtagcggcgctgtccttcagcgtacatggtgtcgaaggcaagcgagcttttacccgaaccggacaagcccgtgataacgacgagcttgtctcgcgggatggtcaaatcgatatctttaaggttatgctcgcgcgcacctttgatgacaattgagttctgtgccatattcgtctgcttctttcgcttcgtttcctggccgcgaaccgggagcgaacgcggcctcaggtccgatcgtacgtatcacgcaaacgctcattgtaacgcagacagtcacaaaaccaggaggaaatcagaacaatcgttccctattcaaaggattcgcacactatgttcgatattcgttttacgcagccggacccgagcggcgatccgcctctgaagcacggcgggaaacggccgcccaggcggcttccgaacgccttcgcaaagccgttttcaggggatttcccgcattccgcttgtcgatcttctcttccgcgcgcgctgtgctatccttcgccttatggaagatacacccgaaatagaacgcaggcgcgcccgcgaagagcgcaccgtttctcagatgatagccttgtactgcgccgaaaaccatccggatcgccgccgcggcgaaaccgcattttgcggcgagcgcatctgttcggaatgcaagatcatcgatgactacgccgtgctcagaacacgccgctgccgcaagatggacgtgaaaacgtcgtgcgatgaatgcgagaaccactgctataagcccgaagagcgcgaacgcatccgttcggtcatgcgctattcgggcccgcgcatgctcaaggcccatcccatagccgccatccgccacctgctcggaagatagccgccggatccgcccttgccgggaaacgcccatcggtagcatctgagcgggcgtcctctccaagcaggccatcggcatagcgcgtcgccaaaacgcccgcaaacagccaggcgcccgcttgtcggcggacgcccgttcgcattacctgcgcgaatcgacggcctggccgataatgccgcgcgcagcaccgtacgtgagaagcagatacgatccgtacacagccaccacgagcagcaccgtcatgcccgtcggccccgcaatcgacaccccgatgctgtcgaagagcgctgagctcatgactccgatcgcgcatacagaatggcagatcgcaaggccgagcggcgcgaggaagtacacgagcacctgggtaagcagcgagcggcccatcatcttccggtcgcagccgagcttcgagagcagccgatagcgctcaaggctgtcgcttgcctcggaaagctgctggatggcaagcaccgcagccgtcgtgatgaggaagacgaacccgatgtagagggcgaggtaggtgatgagcatgcgcatgccgcccgattgagccagcacctcgttggccgtaaacgacatcgaaaccggccacgaatcgctctgataggaaaagctcgatcgcgcacggttctcatcaggcggcaaagccttgccgagcgcctccatgagcgcggcatcgcccgcagtgcggtcaacgccgtagtcgatgtcgaggtagctcatataaggcaccgctccctggctgcgcagcgcatcgacgatctcgtcgggcacgacgagctgcgcggcatcgcttgaaaacgcatgcacgtcgagcggctgcgaatacacccggtcgcttgcgcttgcaagctcaacgcccgcaaccgtcacggatccctcgagggcggcgagctgctcggaaagctccgttcccgactgggcgaggttgttgacgacgtagccgtgcgcacccacatcgaccggctcctctcccgtcgcctcgcgcagcgcgttgaactgcgaagcgccgatgatctgcacgggagtgtccgccaccatggccgcccgatcctgggcaaggccgagcgcgtcggtgtcgacgatttgcccgtaggtcagcagcggctcctggtagatgtcgatctgcatggttttctcagcgaacgaatcccaatccacgccaagcgaggccaaatacgagcgaatgtcgaaatcgttcttttcggcaagctcgatcacgcgcttcgcatcctcttgaaactccggatccatatcctcgacgccctggctgtcccagaagacgttcgccgtcagcgtcgcgtcgtagcgggtgcccgtctccacgccgctcgtgaaaacctcgaccatgcccatgccgcacgagaacacggtgatactgaagaacagcatcacgcagacaaccgaaagcgaaacgaacgccgtgttgatcttgctcgcgatctggcgcaccgtaaacgtggcaagcccgcggtagtacaggcgcttgctgcgctggagcatggcaatggcgaaccctgcaagcgaatagaagaacagcgtcgtgccgacgaccatgagaacggtcgcccataagaacttcggatcgtcgagcatgacgagcccgttttggataagcagcacgtaggcagcggcgaggatgactaccgacgccacgaacagcacgaagctcacccaaggattgcgcatcttcagcttctcgtttttgaagcgtgccgaaagcagatcgatgagcttgtacctgccaaccgtgaaggtgttgaacaacgccacgatcaggtagatcaccgcaaagcagatcaatgtgagcgcacaggcatcccccgagaacacgaattggtaccgctccatgggaatgctgaacaacgccgccgtcacaaacgagaggccctgtgaaagcgcgatgccgaacgcaaggcctatcgcaagcgacacgacccccacgagaagcgtttccaaaagcacgatctgggaaaccgtcgagggcttcatgcccagggtgaggtagatgccgaactcgtgcttgcgccgccgtatgaggaaccggttggcgtagatgatgagaaacccgagcacgcaggcgatgaacaccgaaaagatgccgaggaactggcccgtcatgatgaagatgctctcagtcgcctcgtccttgaggtcgaacagcaccgattggctctggatcgagttgaaggcgtagaacaccgcaacgccgaaaacgagcgttatgaagtagatcgcgtaatccttgatcgaccgcttgatgttgcggacggcgagtttagcacgcatcgcccgcatctcctcccaaaaacgtgaccacttccatgatcctgccgaagaaatccttgcgcgacgtatcgcccctgcggatttcgttgaacaccttgccatccttgatgaacaggatgcgtttggcgaacgaggccgcatacgaatcgtgagtgaccatcatgatggtggcgccgagacgggcgttcatcatctccatggtttcgagcatgatcgtcgcgctgcgcgaatcgagcgcgccggtaggctcgtcggcgagcacgagcttcggatccgtcgccatggcgcgcgctgcggcaatgcgctgcttctgcccgcccgacatctgataggggtattttttcagcacgtcggatacgccgagcgtctcggctatcgcattcaccttcgcgccgatttgattcgcgggaacgcctttgatggaaagggcgagcgatatgttctcgaagccgttcagcgtatcgagaaggttcgaatcctggaagatgaaccccagctcgtcacgcctgaaccgggcaagctcgcgagaacgcagattcgtgatatcgcgcccgccgatgacgatatggccgctcgtcaccgtgtcgatggtggcaacgcagttcagaagcgtcgtcttgcccgaacccgaaggacccatgatgccgatgtattcgccgggaagcacatcgaagctcacgcccgcaagcgcatgggtgatggaatctttggttccgtagatcttctcgatatggcgaaccgagaggatcggctgcgccccgttcgcgtccgaagcgccgcgtggtgcaccggagttcgtgatggtcggtatcgcatatgcttctgccatggtctatccctcgcttttcttcgctgcgtgcatcggtgccacgagacgccgaatggcgtcgatggcctcgaggattctcagtactgccgtttcattcatgatcgtctccttatctgacggggaaaatcctacaggaggcgcatcatggatgccatcgatcgcgcttaccgcatccttacgcttttgtaagatggcgaagcgccccggcttcggatgcggcgcatcatggacgccgcaagcgcaggcagggcgcgcaagataccggagattcgcacccggctcaacgcaacgcgtcaagccttcttctatcgtgcggaaacgcgatcatgaccctcgttccggctccctcttccgaagcgatgcccaaaccaagccccatttctgcgcacatggtcgcgcacagatagagccccatgcccgtcgaggagccatgggttctgccgttatgcccagtgaagcccttgtcgaacaccgagtcgatgtccgatgcaggtatgccgcatccgtcgtcggcgatctcgagcacagtcctcgattccgtcgtgccctcgccttccgcccgcgccgcaacggacaccgtctgcgcgtcgtacttggctgcgttcgcgaggatttggccgatcacgaactgcagccacttgccgtccgcgaagacggtcgccccgtcggcgatgtcaaccgatacgccgataccgctttcgatcagcagttgggcgttcttcttcaccgcatcgcgcaccgcctgcgcaagcacgatttcccgaatgaagtaatctttttgaagcgatgtcgagcgcgcgtagtagagagcctgctcgacatacgcctccactcttcccatctccgccttgatcttatctgccgaaggcccatggagatcggcggtcatcagcttcgccgccgcgatgggcgtctttatctcgtgcatccacgcttcgacgtattcgcggtacgattcgaccatctcccggtaccgagcaacctcgtcgttcatagattttcccgctgccccgagcgcatcgtaggcgatgcgcccctcgatgaattgagggcggtcgatgagctcggccgccagatgactttccgattgcaacgacagggcgtcgactatcgcctcaagctcgttgtagaagcgcctgcgccgcccgaacccgtacgcaacgccgaaaacaaggcaggccgccatgaccatggcgatgaacacgattgccgcgactgcaaccccgagcaccgtgagcatccaagccacaagcgcaattgccacgatccatgcggcgatgacgggcacgttgtcgccaaggtattcggacagcttcatgacagcccctcaaacaagatagccttgaccccttcgcgtgaccagatagtcggtaacccccagcttctcaaggctcttcctcaggcggttgatattgacggtaagcgtgttgtcgtcgacgaactcgtcggattgccacagctcgttcatgatctcctgccgggaaatgatcgtatcgtggttctccatgaggatcgccagtatcttcagctcgtttctcgtgaggtcaaggctcttgccccccgccgacgcgacgcctttcgccaggtcgagcgtcaagcccttatgcgtgatccgcgatgcggcggccgagcgatgcgtgcgacgaagcaccgactgtatgcgggcaagcaggatcgccgggttgtacggcttcgtcacgtagtcatcggcgccgaggttcatgctcatcagctcgtcgaattcgctatccgacgaagtgagcatgatgatgggaacctggcttctcgtcctcacatcccggcatacgtcgaaaccagacgttccggggagtttcagatcgagcaccacgcaatccggcgcgtaggcgacgatctcgtcgacaacccgctcgaacgatacggccgacgcgcagtcatagccttgcagctcgagcacatgcagcaattcggtcctcagagacgcatcgtcttcgactacgaacagcttggccacggcacactcctttcgggatattggatttcatagtaaacgaacccgccgaaaagagcatcccgccgtgcagcccgtcattgtttcgttgacgttttttccgtttttgcagtaccgttcggcacaacggggcacgagggggcggagctcctgaagtaccgaaggagaaagctcacgcccgcaacgacaagcgccaggccgagccccgtgtagaagaaggcgatgaaccattcgggcacgagccccgacatgcgaagcgcgatgcctccgcccatcatgatagccatgacgatgtagcccttcttgtcgaagaacttccaaatatgggttcgatcgtcttcatatcccctgatccgggcagcatgcttgccgaccatcttcgtgaagatgaagatatggaacaccacgaatatgacgatcgtccccacaagcagcacccagaatatccagcccgcttcgtgaaggtaggcgccgattcctatgttcgcgatgttgagacccgctatcatccagacgatccccgcgaccagaaggagcttttcggtcgctatcttgagaatgcccacagaacacctagcctttcgattcgtacagagcggctcgcagaagcgctgccaggacccggcagtcggccgagccttcgctgagctgtgcgagcatcgtttccaagacgaagctgcacagctcatcggcatccgtgccgacgagccttccgagatcggcgcccgcatcggcgagaagcacgcacttgagaccggccgccatatgagcgaacacctgcttttcgcgctcatgacccacagcttccccccgcagcatcatcgccctgatttcaggaagccaatcggagcggaaagctgccagcgcaacgcgcatagcctcgtatacgcggcacacgtattcgacgtaatcctctcccgcaaggggactgcatgcagcctcggaaagggagttgcgccagaacaaggccactacttcggcgacaagtccgcctttggacgagacgtggttgtaaatcgtgccgaccgacacgttgcaaaccgccgcaacctccctgatgccgagagaggccagacccttctccgatgccatcaggtacgccgcgtcgattatcgcttgcttgtctattgcctgccgtgtcactgcgatccctctcggttccgcctttttctttttgaactacgttcagtatatcgctgcgagactgaagcgcgttccgttctgaacatcgttcatatcgtctctacatttgagacgggcagccttggtcagcggccgcttcgcggatgggactgcccgtggacctctttgagacggtcgggcgacaggtgggtgtatatctgcgtcgtggagagattcgagtgcccgagcatctcctgcacgctgcgaaggtcggctcccccgcccaaaagatcggttgcgaaggtgtggcgcatggcgtggggcgaaagcgtctcgtcgacgcccgctgcgcgcagggtcgccttgaacatcttgcgcatcgcatcggttttcatctgattgccccgcgtcgagacgaagaagtactcggactgcttgccgtcgagcagcttcggccttccgaaatggaaatagcgcgacatggacgaggcggcaagctcgtgaatcggcacgatgcgctctttcgatcccttgccgaaaagcttgacctgaaggttttcgaggtcgacgttgatcataagcagccccgatgcctcggagatacgggcgccgcaggcgtagagcagctcgagaagagcctgatccctcatatcggatggtgattgctcgcgagaattgcccgaaagatcctttgcgctgtgtatcgtcagtatcttcgccatatcaaccggcttgatggtatggggaagcgttttaggccgcttcggcccctgcaaaacacccgccgggtcttccggtatcgccccggtcgcgcacatccaaccgaagtagccgcgcagcgagctcatcttacggttgatcgtcgtgcgcgaatactgagcgcgatcgagctctcccagatagagcctgagctgacgatgcgttgcagcgagagcgtccacgccgttgcgctcggcccatctgaggtaatcgaggatgtcgttgcgatacgcccgcagcgtgttgggcgaaacgctgcgctcgacccgcatcgtttcgagatagccctccgcaagcgccgcggctcgggcatcggcaagctcatccatcgcagcgctcccccatcagatgctgcgagcacagatcgtcgacgtaagcggcaagcgcccccgccccgcgctcggcgtatgccgcatagcgcagccgcttgttcttcacccgttcggcaagcggctccatgatcccgaaattaacgtgcatgggctggtagtcgacaacgctcggatcggtcgcataagcgagcagggcgccgaaaacggtctgcctcggcaccgcaggcgccttcgcacccgtaaggctcgcataaacaccgagtgcaacgtgaaggcccgatcggatggcttcgcagtacccctcagtacccgcgagctgccccgccacaaaaaggcgaccggccgcttcggatgcggatgcgagcctcaaatcggcatcgagcagatgcggcgcgtcgatgaacgtgtttcggtgcataacgccgaagcgtgcgaactcggcgctttcaagccccggtatcatgcgaaacacccgttcctgttcgccgaaggtgaggttggtctgaaaaccgacgaggttgtagctttcgccatgggcgtcctcggcacgcagctgcaatgcagcccacggtcgcctgcccgttgccggatcggtaagtccgacgggtttgagcgtgccgaagcgcggagcgtcgatgcccttgcgggcaatctcttcgataggctggcatgcctggaagagctcgcgcgtttcgaaatccttcgccaccacgcgcttcgcattcacaagctcgtgggcgaacgcctcgtattcttcccgcgagaacggcgcgttgagataatcgccctcgccttcctcgtaacggctttggcgaaacagcctgccgtgatcgagggaatcggccatgacgatcggcgcggccgcatcgtagaacgaaagatgcctgcggccggtcaaacgcccgagcgaagccgccagcgcgtccgatgtcaaaggcccgcttgccagaacggtcgcatcggcctcgaacggaatctcggtaacctcggcgcgcacgagctcgatgaacggatgggcttcgatctcttcggtgaccgccctcgaaaacgcatcgcggtcaacggccagcgctccgcccgcagccactcgatgcgtctgggcgacatcgaaaagtcgggatccgagcgcgtgcagctcggctttgagcatgcctgccgcactgtcgggcttctcgcttttgagggagttcgagcagacgagttcggcacaacgtcccgtggcgtgcaccgcagtttgccgatccggcctcatctcgaagagcctgacatggatgcccctatcggcaagctgcagcgccgcctcgcttcccgccaaacctgctcccactatatcaacgtgtttttccatgccgacgatcttagcaaaagtcgaccgctcataccacgacgggaccgtatcgtccatcgggatagcgcacgatcctcccgcttcgctgcaactccgccaatcggaccatgagaaacgttatcgcgtttccctgcatctggaatccctcgtcgagtccttgggactcaacgtaaccgagcatctcttctatgctcatgggattggcgcacatcgcctcgtagacggcatcctttgcacccccgtccgaatctgcgattaccccgcctgcacggtttcgaccgctggactttcctgcgcgccgccccccatccgaaccgtcaacgcgcactccggaaacgtcgcctgcgcgcccgacggcgccgctgcaggaacaagcgcctgcaaagcccgccagctcctgctggccgaacaacgcctccaaaacgcttgagaacgtctcgtcgtcgacaataggcgtcgccccctggtaaagcagcctgttcgaaccgcgcgaagcactcgatgcgatcgacccgggcaccacgagcacttcgcgattggcggcgagggcctcgtccgccgtcgaaaacgtgcccgaaggcaatccggcctcaacgatgagcgtcgccttcgccaatcccgcgatcaggcggtttcgggctctgaaggtgtgccgcatgggaggaaacgaccattcctgctcggagaccacggccccgcctgcatcgacgatctcctgaaacagcccgaaatgcgaagcggggtacagctcgtcgcatcccccgcccagaaacgccacggtgggacccttggcttcaagcgccgcgcgatgggcggacgcatcgcatcctctcgcgcctcccgatataaccgtgatgcgccgtctggccgcaattcgcgcgaaccgcttcgcacacgacgttccgtacggcgtcgcattgcgcgcgcccacgatggcgatgccctcgcgaagcgccgcgacgttcccgataacgaagagtcgatcgggcggatcggcaatatcgcaaagcgcctcgggatagccctgctgctcgcgctcgatcaccgttctctctccgcgcagtttcggtcccgcatatcgggcgaactcgtcttttctcatcaaaacccctttcgctcacatcgatcctattccgtcgcgcagccgcaggccgagcgcttcgcacagatgctcccttcccacacgggggcatgcagccatatcggcgatcgtgcgcgcaatggagagcgttttaacgatgctccttccgctcatctgatgcagcgcagccatgtctttgagaaacctttcgtcttcgctgcgaagcccgcatgcagcgatcaccgattgcccggcctgcgcgccttcggcccgacgtttcctttcctgcgcaaagcggcgcgcatcggcaacacccgcccgaagcgcttcggaatcggtcccgtccttagcacccagcaccatatcgggtgaagcgcgccacacatcgatatggatgtcgatgcgatccatcaacggtcccccgatgcgcccctggtagttcctgatctgagctgcggaacacgaacagcggtttcccacatccccgaagtacccgcagggacagggattcgccgccgcaacgagcatgaaccgcgccgggaacacgacgctgccctcggcgcgcgtcactgcgatccgccccgattcgatcggttggcggatggcctgcagaaccgaaggcttgaattcggacacttcgtcgagaaatagcacgccccccgttgcaagcgagatctcgccaggtcgcaacggcgatccgccgccgacaaggcccgccatgctcgccgagtggtggggcttgcgaaacgggcgctcgcctgcaagtatcggtccgatatcttcgccggcaaccgaatggacaagcgctgtttcgatcagctcggcttcagacaggggaggaaggatcgagggcaaccgcgacgcgagcatggttttccccgaaccgggaggccccatcatgagcacgccatgggctcccgccgccgcaatctgcaacgcgcgcttcgccgcctcgtgtcccgccacatccgaatagtccgacgaacatcccttggacgcacggccccgcatgaccggcttcgcgaatacgccgttcgcacagcccgataggctggccacaatcctgcattcgaggttctccatcgaaacgagtccgtcgtcaggctgggcgcatatgagggagaggccctggtttttcgcgcaaagctcgaatgccagcatgcctttgaccgcgcggacatcgccttcgagcgaaagctcccctacgcacaggcttccgtcgataagcgtcgcatcgatctggcgcgtcgccacgagtatccccagtgcaatcggcaaatcgaatcccgatcccgctttcttcagcgacccgggcgcaaggttgacaaccaccttttcggcgggcatgcgaaacccgcaggccctgattgccgcccgaacccgctcgcgggcctcctggatggcggcgtcgggcatgccgacgatggaaaacgaaggcatcccgctgcctacgaacacctcgaccgcaacgggaaccgcctcgacgcccctgatcgtcgcaccccatacgctgtactgcgcctgcatcgccgaacccggctattcgccaagagagaacgcgtttgcgtggtggcgcagaaacgcacggtcgcttccgatcgcaaggatcgacacgacatcgaatctcaccgctatgtctacggcgtcgtaggcggcaagatacgatgccgcaatgcgctcgtagcgttcgcgcttcttcctgtcgaccgcctcttcgggaagccccttatctatgttcgagcgcgttttaacctcgacgaagacaagcacatcgtcatcctgggcgatgatgtcggcttcgccggccgaacacgtccaattgcgctcgagtatttcaaatcccctcttttcaaggaagcgtgcggcggcctcctccccgcgcctcccgagctcgatgttacggctcgtcttccttccttcgcatgcttcgtccctgaacgtctcttcgttgccgagcgcactctcgtcgacgatcgcctccccctttgcgaacgcatcctcgccagccgcttcggccgaactcccaaacacctgtttctccgcaattgtctcggtcaccatttcggctcctatcctttatcgggaaagccatgctagcgcgcacgtctttcactatcgggaagccaagagggctgatcgaagcatcggcagcgtccggttcgggatctcgtttcgtgccgctccccccgtaaaccttgcaagatttccgcatctttcatacgggaaccggaacccagagcgaccgatccgcagcggaggcaggcgcaagcgaaggctcgccccgacaccgatcggaaaaatggggcgatacgagaaataaagcgcagattccgaagaaccttgcgcgaagccgctctggatgacggcgtttcctaaaaaagcgtttcctgggtgaaagcggtgcagaacgattttctatgcagcggacacaacccctgctctttgatcgcatcgatgtgatccttgctggcatagcccttgttcgcatcgaatccgtaagcaggatacgtctcggcccatcggcgcattatcccatcgcgctcaactttcgcaacgatcgatgcggcggcgatcgacgcgcacttggcatctcccttgaccacgtttacctcgcgcgaatcgagatgcatcggattgccgtcgagcagaatcgcatcgacggatacaccctgcccctcgatggctccgatcgctttaaggaaggcgaaccgcagcgaagcggtcatgcccaccgcatcgatggactcgggttcgacatgctgcaccgtccaggcgagggcgatttcctttatttgcgcggccagctcttcgcgatgctgcgccgtcaactgcttggaatcgttcaatccgggtatccggggttcgggcggcaggacaaccgcccctacggtgagcggtccggccacaggtcctcggcccacctcgtcaagaccgaccgcgatgcctccgccggcaagctcccgctcaagcgaatacagcccgtcgatgcgcgcagcttctgccgcttcggcttcaagccggcgacgcgccgtttcaatggcgctcagaacgcctttcctcgtatcggcgacaagcgagcgctcgagcacggcgaattcggctgcatcggcttcttgaagtcgttttcgtatgtcggctacggtctggttcataggtctcagtatatcggaagcacgggtgcgcgaggcagacgtccacggaaaggagagcactttgcccgcctcgggcggcttctttgaaaccgcagctcttccgccacatggacgcaacccgttttccgaagataaaaagaccccttgcggggtcttttcgattccttggatcctgcaaggttagttgtaggctttttccttgatcttagcagccttgcccaccttgttgcgcaggtagtacagcttggcacggttcacatcgcccttgcgcatgacctcgatcttctcgatcttcggcgaatgcaccgggaaggtgcgctcgacgccgatggagaagctgatcttgcggacggtgaacgtctcgcggttggaggcgccatgacgacggatgacatcgccctggaacacctggatgcgctcgcggttgccctcggtgatgcgatagtggactttcacgttgtcgcccacattgaagtcagggatgtcctgcttgatctgctgttgttcgatagcgcgaatgatgtccatgtttgtttccttcttatatactcaacaaaagcttactgttcggtgcttaggtaaagacacgatcagttagtatatcgccacttgcgatcaggcgcaagagaaattcacaagcaatctggaagcaatccgagacaaccggcaaaccgccccttcggcagcgagcgatgagccggacgagaggacggcgaaactggcatccagcgcagtgctgcatcgcctcgcccagcatgcgatccgagaccggatgcctccacccaatccacgttgaaaatacgccgcgcacctgacgatccgcttgctttttcccagctgcgcgccggctcattatttagtaggatatcctcaggcttgttctcaggcttgcccccaagagaaagcgacggtgcccatgaccaagcagaacccctcatccctccccctcgcttcccccgcgcccgaaaacgcacccgacacgccgcctcggcagggttctcaaaagaagccttcgccggaggcgcgcctttcgaagaaaacatggctgctcatcgtattgctgtcattcgtcggacaggtggcctgggcgctcgagaacaacttcttcaacctgttcatccaagatgtgttcaacgcatcgctttccgatgtcgcactcatggtttccgcttcggctctcaccgccacggcaaccaccctcttcgtgggcgcatggtccgatcgcgtcggaaagcgcaaagcgttcatcggcgtcggcacgatcctctggggtatttcgatcatcgtgttcgcctacctgcaaaccatatcgattgcgctcgcgggcactacggcggcggcgatggccctcggcgttacgcttaccatcgtcttcgattgcgtcatgaccttcttcggaagcctcgcaaacgattcgtgcttcaacgcgtgggtaaccgatatcaccaccgaaaagaaccgcggcaaggtcgaaggcgtgaactccgccatgccgctgcttgcgatgctcgcggtgttcggcggtgcgatgtttctcatgatcgtgcggcccgacggcacggttacctacgattaccccctcttcttcctcatcatcggctgcgcggtgatcgcgctcggcatcgtcgtgctcgccctcatgcgggattcgtcccccgaacgcagggagacggggggatatctcgcaagcgtgttctacggcttcaaaccgagctctctgagcgagaacaagacgctgtacctggtgctgctttcctacctcgttttcgccactgctctgcaggtattcatgccctactacgttctctatctgagacttccctatgttcttggcgaaagctacgtgttcgttatggcgcccggcatcgtgatcgccgcgattttcaccatcttctacggcaagcgcgtcgatcggcacgggttcttgcgctcggtcatcgctcccttggttctattcgtagtcggttgcatggtgctcgccctgttgaacggcatggcgttcgtattcgtcgggtcggtgctcatgctgtctggctacctcggcgccgtcgcctgcttcggagccgaggtgcgcaacaacacgcccgcaggctacgtcgggctgttccaaggagtgcgcatcttcatggtggtgctcatccccatgctcgtcggcccgtggatcggatcgcttgtaagcgcctcgtcggatgcggtcggcttcggcgtggtaggcgacgggttcaccccctcttcgctgatcttcctcgctggcgccatcgtcgccctcttcacgttcgccgtgcttctgctggttcgcagacggcaatccgagaaagcgtagggccatgctcgatatcaaacgcatcctcgcaagcgcgccccgcaagcccgaatcagcgcagcctcgcacgctctacaccgtatggggagagcgcatcgtcaaaggcgagacccccgagtgcgcgcatccccacccccagttcgaaaggaagagcttccactcgctcgacggctggtgggagtgctgcttcgtgcagacgaaagatgctgcggcctcgttgcatgcagccgtcgcgccaagcaccttcgacaggcgcatacgcgtgccgttttcccccgaggctcccctgtcggacgtcggcaggcgcctcgagccaaacgaactgctctggtacagaaggcacttcgaagcgcccgccgagctgttctcgcaacccgatgcgcgcctcatcctgcacttcgaagcagtcgactacgcttgcgtatgcttcgtaaacggcaaccgtgcagggtcgcacgtcggcggatacctgccgttctccttcgatatcacgcctctgcttgtacggggtgaaaacgagataaccctgtgcgtgcacgacccgagcgatgcgggagtgcagccgcgcgggaagcagaaactcgagcacggcggcatctggtacacggcgcaaagcggtatctggcagccggtctggtacgaaatcgtgccttcgagccgcatggaatcgcttgccatcgacgcccgggctgattcggggcagctcgaacttaccgtaaccctgcgcgacgaatacccatcatgcggcaccgcagcagcaggcgcccttcgggtccgcttgctcgacggcgatattgaagtcgtaagcgcccaagcagatgccccccggccgggctcgccggatgcccgcgagggactcgcgcatcgccgcagcgcaacgcttgccatcgatgtggaaagcccgcacctctggagccctgaagacccgcacctgtacaagcttgaactcacttacgggcgcgacgaggtttcaagctattgcgcgtttcgaagcatttcgatcgaacgtgacgagcgcggcgtttcgcgcctgtgcatcaaccatgcgcccgtcttcctcaggggtgttctcgatcaaggctactggcccgacggccttatgacggcgccctccgacgaagcgctttccttcgatatagaaaccgcgcaagcgctcggtttcaccatgatgcgcaagcacatcaaggtcgaaagcgaccgctggtactaccattgcgataggctcggcatgctcgtgtggcaggacatgatcaatggcggatctcccctcagcgcatggcataccagctacaagccaacgtttttccgctgctcatggggccgctttcccgatgacacgccgaaggggcgctcggcgctctcctctgaaagcgccgagtaccgcgcagaatggaacgacacctgcaaagggatcgtctcgcacctgcgaaaccatccatcgatcatcacctgggttctcttcaacgaggggtgggggcagttcgatgcgcgcgaggcaaccgacctggttcgcgcgctcgattccacccgaacgatcgacgcggtcagcggatggtacgatcaggcatgcggcgatttcctcagcgttcacaactacttccgcccgctcgaggtctacgatgatgcgacttgtccgcacagagcgttcgtcatatcggaattcggcgggctcagcttccacctgcctcggcacagcgttctcgaaacatcctacggatacggctctctcgacgacatcgtttcgttcgaagcggccgtccgcgatgcgctcgaacaggccgaccgactcgaacgagacggccttgccggcttcgtctacacgcagctggccgatatcgaggaagagacgaacgggcttctgacctacgatcgtcgcgtgaacaagctcgacaacgggaggagcgcgcaatgaggtttcccgcatccaccgaatcccacctgctcggtcttttggatgaacgcttcggcgcaatcggacgaagccgtagcgacaatgcagcaaaaaccctggtctgcgcatctgcgccagggcgcatcgaacttgccggcaaccacaccgatcatcaaggcggaaaaaccatcgccgccgccatcgaacaccgcgcctacgccatcgcgcgcgcaaacggcaccggctccatccgcgttttcatggacggcttcggaagcttctgcatgggtctagacgacctcgaagccaaagccggcgaactcggaacacccgcatcccttatacgcggcatggtcgccgcatactcccgagcgggcggcaccctgcgcgggttcgacgccgtaagctgctctgatatccctgtcggccgcgggctttcttcctcggccgcattcgaggtgctcatgggagttttgctccgagccctgtgcacccgccacgacgaaacccccgcaagatgcgagatgatcttttccaggcaagagcttacggcgatagctcttgagggagcgcaggtcgagcaggcgtatttcgggaaacccagcggatcgcaagatcaactcgcttgcgcccacggcggcgtggcggccatggatttctcaagcgatcccccgcgcatctctcccatcgcgttcgacgccgagtccttcggctacgcgctctgtctgatcgacagccgctgcgaccattcggcccacaccgacgaatacgccgccgtacccgcagacatgcaggcagtcgcccggctcttcgacggaatcacacttcatgatgtgggtgaacgtgcttttttcgacgggttcgcaaccgctcgcgagcgccttggggatcgggctgccttgcgcgcactgcactatttcgaggaaacgaagcgtgcggggatgcagcaagaagcgcttcgatcgggtgacttcgcaaggtttctcagcctcgttcgcgaatcgggcgcttcgtccgcccaattcctgcaaaacgtttctgcgcgctcggaccgcacggggaaaagccaacccgccatggtcgttttggcactgtgcgcacacctgctcgacggagcaagaacctctcggggcgcatatcgcatccacggcggcggattcggtggaagcgttctttccatcgtggaggcaaaagaagtcgaccgcttcatgaaggcgatggatgcgctgctcgggtaccgtgcctgcattcccgttgcaatcagtcccgaaggcgcctcggcaaagcgggtcgaccgatgacggatcccttgatcgaaccggctcttcaatccaaagcgcgcacctcgctgccaaccgacgacgcacccgaaacggtacgcaaggtcttccgaaccctgcttgcgcgcaattccgaggaagcaaccgcgtacctctacgagctgggcaccgcaagcggctacatcgacaggcaggcccttgcccgaaacatctgctggacgagcgaggaagcatacggtgtgctcgagtgcaccatcaacctcgcgaaacccgagaaagatccgcgcagcatcgcacaagccgcccgatcggaaaaaccgcgttccacctcgcctgcaagccccgggcaaccgcccctgtgcgacctctgctgggaaaacgagggctatgctggctcgcccgaacatcccgcaaaaccaggactccgaatagcgcccatcacgctcggaggcgaactctggggcctccaatactccccatacgcgtacttcaccgaacattgcattgccctgagcagggaccatcgccccatgaagatcgatgcctccgcattcgatcggctgctcgattttgtagatgctttcccgttttacttcataggatcgaatgccgatctgcccgtagtaggcggatcgattctcgcacacgaccacttccaaggagggcgccacacgttcccgctcatgaaggcaggtattcgcggcgagttcgggttagcggtttttcccgacattcgtttcgccatcgtcgattggcccgcctcaacgattcgcctcgcatcagacgatcggaagcagctcgcacatgcagctgaaagggtgcttgccgtttggcgggacttctctaacgaagcgtgcggcatcgcggcgttttcgggtccgaccccgcacaacacgctcaaccccatcgtgcgcaagacggggccgacctaccgcatggagctcgtgcttcgcaacaaccgaaccgatgccgaacatccttgggggattttccatcccgccgaacaccttcatcacatcaagaaggagaacatcggcctcatagagatcatggggctcgccgtactgccccctcgcctggcgagcgagcttcccgccgtgcaaaaggagctggtcgacgctgcgcgccgcaacctggcaacccgcgatctcgaaaaccggctgctcgcccaatcgctcacctcatcccatgcaacctgggccgcagatatctacacccgccggcaggaagagcttttgagttgcgaggagccgtatccacgcgggaatgaaaaggaatcggccgacagatcgcgtgtgctcgcttcgccgcaccctgcatccagtacgcaacccgaccgcattccttccgaaacgcccgaacccacgcgcggagagccttccggtttcggacttcaccccgtcatcaaacaggaagtcgcgcacgctttcacgaccatcctcgaaaccacaggcgtattcaagcaaaccgcccagggagatgcaggttgggattcccttatcgaagcgctcggtaaaacgcaccgggagcagcaaaaaccgacgtcgtaggccaccgcacccgaaactcgcccaaagctgcggctgcggctgcggctgcggctgcggctgcggctgcggctgcggctgcggctgcggctgcggctgcataaagcatagtgcatctcgccacgattcgcccgaaactcgcttgaaccttacgcgaatcaaccgaaaacccaacgcattttctatccaaatcttacacgagttttttcatcatacctgatcaataacgttatttctcatccttttcagtcgccgtccgtgttatcctctgcccatgccgatcatattgtgcgacatatcttcactcgagtactggcgccaccgcagcgcacgcgaccttgctgacgaaccgcgctccgttatgctgcgcggcaattcgggccgcacggacaaaccaacctcagctcagatcgatgctctcctcgaaagagagttttcttttctttcgcgacccgttcatcttcttgttccaaatgaaagaacccgctgcagagacgagcgcgttttctgtcacacgcggccaagcgaaataccatgcaactccttcatccaggcatcggaggatattttcgtttatcgcccggaacccacattcatccagactgcgagaaagctcccggtctcccttgccacgctgatcggcctcgaactgtgcggaacctatcgattgcccgtcggaggccatgttacccagtaccaagttcctcctttagcctcgattcagtcgcttcgacaatacgcagaaagggcccgcggaatgtacgggacgaccaatgcgaagcgagctctgcaatacgttatcgacggatccgaatcgcccatggagtcgaagctttacgaactcctatgtttctccaagagaatagggggacgcggactgagcaaaccgaacctcaaccacaagcttgctacaacggaatcgttcagaagggcaaccggcaagaagagcctgagatgcgatttgttctggcccgaatacaacatcgcagtcgagtacgacagcagcgaacaccacacggggccagacaacatcgccgacgacgcaacgaggcgcgccgcactcgcaagccttggcatcaaagtagtcaccgtaaccaatcgccaggtcaaacgaatcgtcgagttcgatgtggttgtcgagcttcttgaaaagctgatgctcaaaaggaagcggcccaccagcaggcaatggaggcataaggaactcgagttgagatcgaccatactcccttatggagcctcctgcgatcccctgtaaccaaggtgggaagaaaaccgcaatcgaccttcctctggaaaatcgcccccaaaatggcggccaaggcaagcttctgtcaatttcgaggctcgcaaaatgatcctctttccgcgtttgcgcaggtcacggatttcgcgacagcgaaataacacggaaaagcacccgaaaccgtgccgtttcgctacagaagcttgccttgaccgccattttagataggtttttcagaaaggaagtgcttccatttacgctgagctgaggtaggccgcccgccactctgcatttcgccgagaaggacgccccggacgctgcctttgaatgccgctctcggacgtcgttcttggacaccgttcttggatgccgctcttgaatgccaacctcagaccgcatcggctaccgcccttggaagccgtctcgaacgccgccctcgaatgccccgtccttggaagctcccgtatgccgttcgcgcgagatgtcgtacgtctttagatcaaaagcaacagcgcgtaggcgacaacgcccgctatcgcacaccagagaagcgattttgtcttcaagccgacaaccacgacgatcgccgccgccaacaaaggcgccgctgccggccacaagcccgcgtcgaacatcccgggtgtcagcagatcgttggcgacaagcgcagcgaatgcggcaggggggatgaatccgagcgcttggcttaccccttcgggcagctcttttcctttgagtaggaaaagaggcaccacgcggcaaacgagcatcgagcccgcacagcaggcgaacacaatgagaaaatcagaccaattcatcgcagtcatcgctgcctcacccgtgtaaacaccatggcggccaccacgccggcgatcgcgccgatcagaatcgcagggcccgaaaggcccaccgctttgcacgcgaacaccccgaccatggcaacgcctacggctatgccgtttgcgacggtgaccttctgagtgcacagcaggcagatgaaaatggaagtcatggcgaacgaggcgatggccagcggtatcccgatcgcattgcccaccagcacgccgactacgttcgaaagggcccaggaagcctgcgagaacaggttcaccatcgtagcccgaccgaccgaccattcgccctcttcgaacttggacatgttcacgccgtagctctcatcggttaccgtcgccgcaaacagaaacgagacgcgcttgcgcgtcttcgcgcacaccttggcaaacgaagcgctgtagagcatctgccgtgtattgacaagcgaaaccgaagccacgatcgaagcgatgggcgctcctgccagccacatgtttggaatcatgaactgaccggctcccgaataaaacagggcggaaagcagaaatacctgcaaggcatccaacccgatcgacgagcacagtattccgcagggtatgccgatggcaacgtatccgagcatgatcggaaacgctgcattgagcgattgtcgtatgtgttcctgagatggcataacctgcatgattatagcgattcccagacccgttgtaagcccccgaaccgcaaaacttttcagggacgcgtatcgcagaaggcccaatcagcgatgaagcgattggggaacgaacagatcctgatacaggcttttcgcgaaacggtccgtcatgccggcaacgtaatccgttaccgcacgcagatcatcgccgtccgatatcgctcgatactcttggggaacctcgtctatgtgctccacgtagtaatcgaacaggtcgccgatgagatgcatggctttgcggacctcggccatgacgacgggagccatgtacacgcgatcgaacagaaaccggcgaagctcgctcatggcgtcccacaccccttcgctcagagcgatgtcgtcgcgggcggcggacgtctcgaccatatcgagtaccaaggtttggatccgcgaggaatgatccggaccgagcacctcgtgcgtagaggcggggagatccgattcccgcagaacgcccgcacgtatggcatcgtcgatatcatggttgacgtaggcgatgcggtcggctgtcgccacgatacggccctcgtaggtttcggcccgcaacgaaccggtgtggcagatgatcccgtctcggacttccggcgtgaggttcaaccccttgccgccgttctcgatcacctcgactacgcgcaggctctgctcgttgtgccggtacagcaggtttccctcggagccgtcgatgtgcaccccccgatgccgggcgatgcacatcgaaagcgcctcctcccccgtatggccgaacggcgtatgcccgagatcgtgcccgagggcgatcgcctcggtcaaatcttcgttcagtccgagggctctcgctatcgtgcgggcaatctgcgaaacctcgagcgtgtgggtgagcctcgttctaaagtggtcgccctcggcagcaaggaacacctgggttttatgggaaaggcggcgaaacgatttcgtatggaggatcttatcgcggtcgcgctggtaatcgttacgcagaatatcgggctccgtcgagcgcgccctgccctcgctttcgtcggcgaacgaagcctcttccgaaagcgtctcgcgctcgcgctgctcctggttttcgcggtagatgatatgcatgccgcctccttgcgctcgatccgggcacaaaccgttttcgtcagtgtagcagatcaacgagatccgagccgcattcgtgcagatccgatcaggacgcccgttcaacaccttgcacttcgcgcctcctgatcctcgctttctgccaggcgctttacttcctcttcgtcttgcttattccgaacatgcgcggtccgcctccatgatggagcttggcgcaaacaccccgcgctcggtgacgatcgacgagataagctcagcgggcgtcacgtcgaaggcggggttgtacacagagaccccctcgggaatgcacggcgaaacctctgaggggtcgcgctcttcgatgggtatctcagcgccgcacgaaagcaccatgtcgagcgtcgacgccggggcggcgacgtagaaagggatcccatgatggcgcgcgagcacggcaaggccgtaggttcctatcttgttggccgtatcgccgtttgcgcagatgcgatccgccccgacgataacggcatcgatcttcccggcagccatgaccgaggccgccatggagtcgcagatgagcgtgcacggcacgcctgcccgaccaagctcccacgccgtaagccgcgcgccctgcccgaccgggcgggtctcatcggcgtacaccctctcgattttgccctgctcgaatgccgagtacacaacgcccagggcagtgccgtaaaacgccgttgccaaacttcctgcattgcagtgcgtcaggacgcggcttccccttcccaaaagcgcagccccgtacatgccgatcgcacggttcgccgcttcgtcttcctctatcatggcctgcacatcgcctgcaagcagctttgcaacatcgcgggcggataccgattcgcatgcggcctcgcgcgcacagctcagagcacgctcgacgccccacgcgaggttcactgcagttggacgcgcagaggatacgctggatgcgatcgtctcaagttcgaagaccaggcatgccgaagaggtagcctcggattcgtttgccgcgtacaaggccagggcggccgcaccgctcacgccgatggcgggagcgccgcgaacggccagcgtctgtatggcttctatcatttcttcgcacgtcatcacatcccgatagaccaacgattcgggcagacgccgttgatcgacgatgcgcacggccaatgcaccgccgtccgcgcgggcaagcgcgatgctgcgaggcagattctctactcccatgggtccctccattagcttcgatgccatcagagtatactcgataggccgcatcggcgcacgtgctgcgcaaagcccgaatcgcctcgaagacgacatcgcgtgcaaaagccatggggttccaaggggaaagggaaacgccccgaccttgacggccggggcgcctatcgcattggcattctgcgcacgccgcaagcggcttcacgctacttgtcgcggttgtttcccatcttctcttccagagcagcctgggcggcagccaaacgggcgagcggcacgcgatacggcgagcagctcacataggtgagaccgatcttgtggaacgtcttcaccgaatcgggatcgccgccgtgttcgccgcatacgccgagcgtgatgtcgggattcgtctcgcggcccttcgtgcaacccatatcgacgagcgcggcaacgcccggatcgactgtctcgaaggggttgaaggggatgaggcgacgctcaaggtaacgcggaatgaacttcgactcgacgtcgtcgcgcgagaagccgaacgtggtctgagtgaggtcgttggttccgaagctgaagaaatccgccttggttgcgatctcgtcagccgttacggcggcacgcggaagctcgatcatggtgccgatcgggatgtcgagttcgactccctcttccttgcatacctgcgcgataacctcttcgcattcctcgcgcaacacggcaagctcgggaaggaccgaaacgagagggatcatgatctcgggcttcggatcgaggccctctttcttcaggcgggcagccgcagtcgtgatcgcgcggacctgcatcgcgggaagctcaggatacaggatggcaagacggcagccgcgaaggccgagcatcggattcgcctcgctcatcgcatcgacctgatccataagcttgcgcttggcggcgatatcggctgcaggagcgcccgacgcctccatgcgggcgatctcgacatcgagctcgcgagggctctcgaggaactcgtgcagcggaggatcgagcaggcgcacgatgaccggcaggccgtccatcgccttgaacatgccgtagaaatcacccgtctgggcggcgagcaggtcgtcgagcgccttctcgcgcactgcgggatcgtcggtgaggatgaacgactggatgatctgcttgcgatcgccaaggaacatgtgctcggtgcggcacaggccgatgcccgtcgcaccgaaggagcgggacagctccgcatcctcgggattatcggcgttcgcgcgaacgcccatggtacggaattcgtcggcccactcgaggatcgtatcgagatcgcccgtcagctcgggaagaaccagatcgacggcgccgagcaccacgatgcccgtcgtgccgtcgatggagatcatatcgccctctttgatgacgatgtcggttccgacaaccgaggcctctttcttctcggcatcgatcttgagcgcttcgacaccgcacacgcacggggttcccatgccgcgggcgatgacggccgcatgcgaggtcttgccaccgtgggaggtcaaaatgccctcggcgctgatcatgcccgcaaggtcgtcgggattggtctcccagcgcacgagcacgcacttgcggcccgcttcggcaacggcgacggcatcggctgccgagaacacggcttcgccgacagcggcaccggggctggcgttcaggcctttggcgagaacatcgtaatcggcggtcttgtcgaactgcggatgcagcagctggtcgagctgctcggggtcgacgcgcatgacggcctcttccttggtgatgaggccctccttttccatttcgatggcgatatggagcgcagcggcggcggtgcgcttgcccacgcgggtctgcaacatccagagcttgccctgctcgatcgtaaattcgatgtcgcacatatcgcggaagtggttttcaagcgtaacgaatacctcttcgagctctcggcccgcttcctcgaggccctcgacgtgcttcaggtcggcgatagggctcgtgttgcgaatgccggcaaccacgtcttcgccctgagcgttgaccaggtaatcgccgtagaattccttttcgccgttggcggggttgcgcgtgaaggcaacgccggtggcggaggtttcgcccttgttgccgaacaccatcgactggacgtttacggccgtgccgagatcgtctgcgatcttgttctgcttgcggtaaagcgttgcgcgcgggttgttccagctgccgaacaccgcttcaatggcgaggcgcagctgcacgtcgggatcctgcgggaaggcggccttgccgtcgacgacaagcgtcggataggcggaggcgtccacgttatcggagaagatctgcttgaattccgaaaccagttcctgcaggtcttcggccgaaagatcggtatcgctcttcacgccgcgggcgtttttcatagccgtaatcgcattttcgaacagatcgccgtcgagattcataaccacgttggagaacatctggatgaagcggcggtaagagtcccatgcgaagcggggattctcggtctgcttgatgagcccgttgatggattcgtcgttcaggccgaggttcaaaaccgtgtccatcatgccgggcatcgacatcggtgcgccgctgcgcacggaaacgagcagcggatcctcggcatcgccgatcttcttgcccatgcgggcttcgagatcctcgcggtactcctcgatggtgtcaagcgcgccctcgggccacgtgttgtcggcattggcatactccatgcacgtctggcatgaaatggtgaatcccggaggcaccggcagcccgatgttggccatctcggccaggtttgcgcccttgccgcccaaaaccgccttcatcgtcgtattgccctcggttacgttgttgccgtccgcgtccttgccgaacgcaaacacgcgctttacttgatcggtcacctttttctccttagcgcttggttgccaaatcactcaccacgtatcattacgaatcaacgccctcgccgaaggcccttcgtgcgccatttccgcagaggtcgggcgttatttcccatagtaacgcaaccccgctccacccgcgtgatgattatgcggttttcggcgcgtggagcagggtggacggatgccggaacgcatcggttcggagcgcccttgcaaagcgcccgaacgatcccgcagccgctacaacaacgcgtcggtcgaaggcggatggcaccgctcgtagtagcgcagaacctcctgagcggtttcttcgacggcccggttgtcggtgcggatgacgatgcagccgagcttgcgcataagggccctcgattcttcgaggtctcgatgcacctgctcggggtcggcatagctcgaagcgaccgcagtcgcgttgccgagacggcgctgccttatgttgatgagaacctcgggcgtggtcatgagcccgaaaagcttcgtgggctccacgtcgtagatctcctgcggcggatcggtatgcagatcgagcggcacgttcgccacacggtagccctgctgggccaggtagatggaaaggggggtcttggacgtgcgggaaaccccgatgagcacgatgtcggcctgggtcagatcctgaggattgcggccgtcgtcgtgcgcaatcgtgaactcgagcgccgcgatgcgacggaagtagttctggtcggccacatgcagcccgcccgcttccttcgacggcgacaggccgctcatgtcggcgatggcgtcgatcgccgccgaaagcagatcgacggcgacgatgttggcatgctcttcgacgtaagccttgagctgaacgcgcaaagcctcgtcaacgagcgtatagaacacgagcatgcggtcgcagccgagcacctttttatgataggccgcatgctcttcgaagaactccttgatatcggcaaaggaatgaaccttcgggaggacctcgatgcacggatcggtcacgccgaactggctcgtcgccgcgcgagcgacggcctgcgccgtcaaccccaccgaatcgctgatgacgtggatggtgggaagcggcgttttgttatccaccgtgacgggctcgagcaccatggggctaccttcccgacttcgccatcttgccgaaatccgccacacgggcgaacaccgagacgaagcggttgagcagccgcagccggttgttcttgagggctacgtcgtcgtccatgatgagaacgtcctcgaagaagcgatcgatcgggccgcgcagcgcagcaagctcgcgcagagcaaccgcgtactcgttggccgcaagagcgtcgtccaccttcgagcggaccgccgcaagagcttcggccaaagcccgttcggcttcccccataagcgcctgttccacctcgttgcccagggccgcatcgcgcaagttgttcgcacgggcataggcggttgctaggtcgtccatgatatcggtcatatcttcgcgcgcggactggagcgcctcgatgcgcgcgatgatctcggcgggttcggtaacgcccgtggcaagcaccgcgtcgatcacatcggcaggcaggcccctgtcgcgcatcatcaccttcgtgcgcgtaacgaaaaactccgacacctcggtcgaaacggcatcgcgatcgaaatcgaccgccgaataggtgtcaagcgacgcctcaatggcgcggtcgagcgagacgggaaggcccgccgcaagcatgttgacgatgccgatggcggcacggcggagcgcaaacgggtcggatgagcccgtgggaccctgccccacggcaaaaagaccgcagatggtatcgagcttgtcggccgtcgcgacgatcctgcccactacgctttcaggcagctcgtcgccggcgaaacgagggcggtagtgatcggcgatggcgcgggcgacttgcgcggtctcgcccgacgcttcggcgtagtaagaccccatgatgccctgcacgctcgtgaattcgacgacggcgttgcttaccaggtcggccttgctgaggtaggcggcgcgatgggcgtcggcggcatcctgcgcagcgaggcgcgcatctgaggcgagctcgtcggcaagggcgaccacgcggtcggtcttcgccttcatggttccaagcgtctcctggaacaccacttcgtcgaggcgatcgacgtaggattcgagcggctccttcagatcctcttcgtagaagaacttcgcatcggccaggcgtgcgcggacgacgcgttcgttgccgtcgatgatggtggatgcgcaatccggattgccgttgctcaccacgatgaagcggttcgtaagcgaccccgcctcgtcgtagagcgggaaatacctctgatgcatgagcatcgcatcgacgatgatctcttcgggaacgcgcaggaactcctcatcgaaagaacccacgagcaccgtcggatactccgttagattgatgacctcggtaagggtcttcgccggaagctcggcgcgatagcccgtttcctgctcagcggccgccacgcccttgcggatggcctcctcgcgcaggctctcgctcggcacgacgcacgcattcaccacgacatcgatcaggtcgtcggccgccgagaccttgtgagggccgggagccaggaaccgatgtcccctcgtcgcgttgcccgcgacgaggttcgcgtaggtcaccggcacgatctcggagccgaaaagcgcaacgagccatcgcacaggacgcgagaagagcaccgtttgggtgccccatctgcacgatttgggccacgagattccctcgataagcccgccgagcgcttcgggcagcaggtcggcaaccgcacgtgccgcgatgctcttggttgcatatacgtattcgacgccgtcgatctcgcgccgttcaagctcttcgaccgtcacgccctttccgcgggcaaaaccctccgcagccttcgtggggttgccctcggcgtcgaacgcgatcttaatcgacggacccttgtgctcctcgaccagggcttcggtttcctcggcaaccgattcgacgatcgagatgagacgcctcggcgtcgaatagatgcgcacggcgccatggggaatgcgaagcgcatcaagcgtttccggaacaagtttttccagctgcttcgtcgcgttcgaaaggtcgaatgcgggaatctcctcggttccgatttcaaaagcgagcgtccgtgtgttcccggccatgttacgcctccttcccttctccgtcgtcgcctgcgggcttctcgcccaccacatgctcgagatacgatgcgcaaaccgctttcgcaagcgtgcgcacgcgcaggatgtaggccatgcgctcggttgcagatatcacgccccgcgcatcgagcaaattgaaggcgtggcagcatttgagcacgctgtcgtaagcgggaagcggaagccccgcatcgagcacgcgcatgcattccctctcgcgctcgttgaattcctggaacagaaactcggtatcggccacctcaaagttgtacgcagagtactcgcgctcgttttcgaggaacacatcgccgtacgtgaacaccacgccgtcgtcgccgcgcgaccagacgatgtcgtatatggaatcgacgccctggatgtacatggtcagccgctcgagcccataggcgatctcaaccggtaccgggttgcactcgaagccgcccacctgctggaagtaggtgaactgagtcacctccatgccgtcgatccagacctcccagccaagaccccatgcgccgagcgtggggctctcccaatcgtcctcgacgaaacggacgtcgtgcgcatccacgtcgattccaatggcgcgaagcgagccgaggtagagatcctggatgttgtccggcgaaggcttgatgagaacctggaactggtagtagtgctgcaggcggttcggattctctccgtagcggccatcggtgggacggcggcatccctgcacataccccgtcctccaggtgtcggggccaagcgaacgcaacgtggttgcaggcgcattcgtgccagcacccacctcgttgtcgtagggttgcaggataacgcatccggcgcttgcccaataccgctgcaggcccatgatgacgtcctggaatgtcggaggcagcgagcttgcttgcgtctcgcttgcgggttcgattgctgatgacatggttctccttgcgtccttgattcgtacttttcccgaaagccctactgaagaactccgaagctctccaagggccagtagatgaagcagccttttccggttacgctcttcgctttgaccgagccgaagtagcgagagtccttcgaattggtgcggttgtcccccatcacccagatctcgccctcgggcaccgtgtaagggtagcttatgtcaacgagcgtgctcgcgaaggggtcggaaggcaggccgtgggtgtagggctcgtcgagcgcgacaccgtcgacgtagaccctcccgtcgatcagatcgacggtttggcactcggttgcgatgcagcgcttgatgagaatccgcccggggatctccttgtcctcgaaagtgacgatatcgccgggctctatgtcgcggaagtagtaggtgacccgctcggaaaacaccttgtcccaggtcataatggtagtctccatcgagccggaaggtatttcgtagggctggatgacgaactcgcgaagaaaccacgacagccctacgacgagggcgatcatgacaagaaggctcagtaggctccgaaatattgacggcctatggggatcggcgtgctgaccggcatccatgaacgtttcttcctttccatccagggttcgccaatcgatacgcctgaatacgtttcgacggtatatgataccgcttcgcacctgaccgaacgcgtcgggcgataaagaattcagaaatccacgacccgaaaggcgcacgcggagagcgcatcaaaagcgccccgtctcgacgcctccggaaagcgaccccagaaacgcgcggtccgattcgtcgaggttcgccgttgcaagcaggtcgggacgcagccgcgacgtacgctcgaggctctgctcgcgacgccagcgttcgaccgccgcatggtttccgctcaaaagcacggcgggcacctccataccgcgaaagctcgccggcctcgtgtactgggggtactcgagcaaaccgtcgtagaagctctcatcgatggcgcccgcttcatcgccgagcacgccttcgatcttgcggacgaccgcatcgatgaccaccatggaggcaagctctccgctcgtgagcacgtaatcgccgatggaaatcgtcttgtcggccagcgtgtagacccgctcgtcgacgccttcgtagtgcccgcaaacgaacagcaggcgatcgcgctccgaaagctcggtggcgagcgcttcggaaaacggctcgcctgtcgggctgagcagtatcgtgtagggtttttcgccccccgaagcggctatctcgtcgtacgcttcgaatatcggctcgcacttcatgacgagcccctgaccgccgccgtaaggatcgtcgtcggtcgtccgatggcgatcgtgcgtccagttgcgcagatcgtatgcggtgaaatccacgatgcccttttcctgggcccggcgcatgatcgacgaacccatgatcgagtcgaacatggcggggaacgtggaaagcgtctctattctcatggatccgtcctttctcttcaaaagcaggcgtcgaggccgcggggattgcggccggaaaccgcctagcagtcgagcaggccttcgggcaggcgcgtggtcagcgtgcgggcatcttcgtcgacggcgacgacgatagcatcgacgagggggacgagaacatctcccgcctcgccgtcgattgcaacaagctgctgagctccgttgtcgatgatctcgcgcacggtgccgatgaatccgtgcttctcgtcgcagacccgataccccgcaagcgcctcctgcgcgacgacatcgaatccttcgggcagatccgctcttcgaaccaggcacgagcagcctgcgagcgcttcggcgcgatcgatcgtatccacgctgtcgaacatgacgaggtacgcatcgtctccgagataggtcacatcctcgaccgtgcctgtgcggggcgcgtcgaggacaggcggcacgaaagccgcctccatgcccgggcgcaacaaaaaaggaaggccggacgcaccgcgtgcgaccagccccccttgcaggcttttcggctttaccagttcggctacgtttgcccagtcgcgcatctaatcgatgagctcgacttcgacatgggtgtcggtgcgggatgccgccgcgcgtgcaagcgtgcgaatggccttgataaccctgccctgacgcccgatgacctttccggcatcgtcttcatgaacgcggatctcgacaaggatcgtgccgtcgtcagcttcgctcgaagcgatctcgagctcgtctgggtattcgaccagcggctcgacgaccgaggtcaccaatccggcgatgtctgtcgcttgcgcggacatgacgctactcgcccttgcgagcggtttcgatcaaacgggcaaccgtatcggtcggctgcgcgccgttcttgatccaggtatcgaccttctcgaaatcaagcttcaccatagcgggatcgacgcacgggttgtagcggccgacctcctcgatgaagcggccgtcgcgcggagcgcgggcatcggcgacgacgatgcggtagtaaggtgcctttttagcgccgtggcgggcgagacgaatcttaactgccatgaagatgaactccttttaccatgaaatacaacgttttgggcgtccgacccaagtcgaatcgacatccctgaaaaacagcaattgctaataatagggtgaaaacccgcttatggcaagcgttcggcgaaaaggcatccgcgaattacagaaagcacacccgaaaaaccctggttccacccgcttccgcgcatctgcgcacgctgcgcggaagcgcgccgggcggctatacggagtggaagtagatgcgcgtgtttgcgaacgtgccgtccttcatgcgaaatccttcgggcacggtgccgaccaaagcgaaaccgaggtcctcgtacagccggatggcgccggcgttcgtttccacgaccgcgttgaactgcaagcctttgaatccgagccgtcccgcacggtcaagggaatcgctcacgagcgcacgcccgacgcccctgccccgcatcgccttggaaaccgcataactcgcattggccacatgcccgcatcgcccgacgttgttgggatgcaggattgaaagcccgcacacttcgccgtcgcacacggcaaccgtcgttgccgactgagacgagaagaacgtgcgtgcggaatcgacgtcgagacattcttcctgcggaaacgcaacgccggcctctacaacctcgttccaaatcgcgcacatcgccgtcaggtccgccccctcgaaaagacggatggacaatgcaccatctcccatggctatcgccgcactcctttcatgccccgcctaagcgaggttcgttttccgatcgataacgtagacgcatatcgcatagaacgcagcagccgtcaccagatagatcgcaatcgaaattcccgatgaaagcatgttcatggcctcgtagccgtacgaagtgttgtaggcgaagcccgtggcgatcataaccgttttgatgctgtgaagcagcccagcggcccacgagagcccgaaaaacaggccgatccccgcagcaaccttgtgctttgccgccagagcgctcccgagcgcgaaggcggcataagccgtcagcaccatggtcagcgcctgcaaggcagaggtcgccgtcgcgagtaaaaagcttccaaacgatgcgatatccgagaacccgaacgacgacatcagcatgaaatagggaatcgtttcggagaagcccgccgagaaccccatggcggcgaccgaggcgagatacccgcagaagccgacgacgaccgcatcgatcagcacccagatcatcgcggttaccaccttcgacgccacctgctggttagcggtgacgggaagcgtgagcgtcagatagccctcgtctgtgaaaacgttcttgtagaatcggaagatgatcgtgaacagcgttgccgccgatgccatgaacaacgcgaacaggcaaaaggcacccgtcatggccagcatgaccatcatcgatgcgccgaagcccgacgagctgtaccacgagctgtaggacgagtcgagcgtatacgccccgaaaaagcatgcggcagcgccgatgcccgcagcaagcgctgcgatatgaacgggaacgaggatgcgggaaagcgccctcatgtcgtatttgatgagtttgcctagcatctgaacgcctccctgaagtactgatcgaggcttcggccggtctgctcgtgcaccaagcgaggcgacgagtacatggcgacgttgccgtattgcagcaagatgaaatcgtcgagcactttttcgacatcggaaacgagatgcgtggagatgagaatggtcgaatcgcggtggtagttggcgatgatggtcccgaggatgaaatcgcgcgccgccggatcgacgccgccgatcggctcatcgagcaagtagagtgccgccctgcgcgccatgacgagcacgagctggaccttctccttcgtgcccttcgacagggcccccatcgtcgaagccgtgggaaccgaaagacgcatcagcatgtcctcggcgagccgacgatcgaagtcggcatagaaatcggcgaagaacgcaagcgtatcgctcactttcatcgacgggctgaaatacggccgttcaggcaggtaggaaacccgcgccttcgtggacggcccgggttcctcgccgaggatgtaggcggcgcccgccgtaggctgcaaaagccctgcaatgagcttgatgagcgtggttttgccgctgccattcggcccgagcaagccgaccacgcgcccgcggggaatcgagaacgtcaccgcgttgagggcgatcgtgcttccatagcgctttgtcagcgctcggcaatcgagcaccgcggcgagcgtcggatcgggtgacgctgcgttcggcgggagatacgcttggtccatgggacctccttcgcgatctttctgctatttatcgagacctttgagcatgtcttgcatcttcttcatgtcggccatgctcatgttgcccatgccgggcagcgagcgacgacgtttcttcttgcccttcttgccgcgacgagcgttgccgtcgtcggcgggcatgaactgcttcatcatcttctttgtttcgttgaacttcttgataacctggttgacatccgaaacctgcacgcctgcgcccgccgcgatgcgcgcgcgcctgctgccgttgagcacatcgggcttctcgcgctcctgaagcgtcatcgagtggatgatgacctccatgcggtcgagcgcgctttcgtcgatctgtccctgggacatggccttatcgccgccgggaagcgctgcgacgagtttcgagacgccgcccatcttgcggatctgcttgttcatatcaagaaaatcgttgaggttgagttgggcgcgcatcatgcgctcggctgcctcggcctccatctcctcggcctcgatcttcgccgcgctctcgataaggctcaccacatcgcccatgccgaggatgcgtttggccatgcggtcggggtggaattcctcaagcgaatcgggtttctctcccgatgaaatgaacttgatgggcttgcctgtaacctgcttgatcgaaagggcgccgccgccgcgtgcgtcgccgtccatcttcgacatgatcacgccgtcgaaatcaacccgctcggcaaaggcagaggccacgttgacgacgtcctgaccggtcatcgcatcgacgaccatgagtatctggtcgggcttgacggcgcgcttgatgctctcggcttccgtcatcatctcctcgtcaacatgcaaacgacctgcagtgtcgatgataacgacatcgcgcaggctgtcgatggcgtcttggatgccctcggttgcaatcttcacggggttctcgccgtcgccgcggtagactcgcacgcctatttcgccgccgagcgtttcgagctgatcggcagctgcgggacggtacacgtcgcaagccacgagcaggggttggtggttttcctgtttgagccgataggccagcttcgccgcagcggtggtcttgcccgagccctgcagaccgacgagcatgatgacgttgggaatacggcttcccagcacgagtttcgaatcggtgcgccccaaaagctcggtcagctcgtcgagcacgatcttgatgacgttttgagcgggtgtgagcgattcgatcacctcggcatcgaggcagcgctccttggtgttcgcgatgaaggtcttcacaaccttgaagttaacgtccgcctcaagcaaagccatgcggatctcgcgcatggcctggttgatgtcttcctcagtcaaacggcccttgccgcgcaggcccgagaatatgccctgcaagcgttcggaaaggttttctagcatggatgcgatcctctgtcggtatggtcttatgcgtttgtgaaattatactgcaacaccgctaaccgacgaaccgcaaagccccgagcccacaaacaaacgattgcacccggttcaagcggggccgcactgcgccgaacggggtctacgcaaggattgccgccgaatgcgcatcgcgaaccgtttccgatcgaagatgcgcggctaagcccgtttgtcgaaatcgccgatgagggctcttgcaaaatcgtgcgcgtcgaaatccttcaggtcgtcgatgccctcgcctacgccgattttgagaacgggcaggtcgagctcgtggcttacggcgagcgcaatgccgcccttggccgtaccgtcgagcttcgtcaccaccacgccgtccaaatcgagcgcacggtcgaactcgcgcgcctgctgcaagccgttttgaccggtggtcgcatcggtgacgagcacggtgtagacgggcatgttggcccgcttgcgcacgacgttcacgaccttctcgagctcgcgcatgaggtcggccgacgtgtgcaggcgtccggccgtatcgacgagcacgagatcggcacccgtcgattcggctcgctcgatcgtatcgtagcacacgctggccggatcgctcccccgctcacgcgtgcatatctccacatcggcgcgccttgcccactcttcaagctgctcgatggcagctgcacggaacgtgtcggcgctgccgagcagcacatggcgtccggcatcggtcgcctctttggcgatcttgcccaccgtcgtagtcttgcccgtgccgttgatccccacgaacaaaacgatggcggcatcctcgtcgaacaccctctcgccgccctcggcgaacgtgtcggcgatctggtcgttgagcagatcgagcacggcatacgcgtcgggaagcgccttgcgcgtcgcctgatcccgcagattttccacgatggtggaagctgcgctcgcgcccacgtcgcttaagatgagcgtctcttcgaggccgtcccagaactcgtcgtcgagatcggggccgcgatccaaaaggacgttcatctgctccttgaacttatcgcgggaacgggagagcccctcgctgatcctatcgaaaaatcccattatcaatcctccgcatatcgaagtgcgtggtcgagcttctggctcaccacgcgcgttacgccgtccgcctgcatcgagatgccgtagagaacgtcggccatctccatggtgcggcgctgatgggtgatcattataagctgcgtcgtatgacgaagcgaatcgaggtaagcgcagagtctgcgcagattcgaatcgtcgagcgcggcttcgacctcgtcgagaatgtaaaacggcgtcgatcggatgcggtagacggcgaacagcagcgcaagcgccgtaagcgatttctcgccgccgctcatgagcatcatcttggtgatgcgcttgccgcgcggctgggccgtcacctcgacgcccgtgttttcggggtcttctggatcgacaagcgaaagttcagccgatccgcccgggaagagtatggcgaatatctcctgaaagttgatattcacctgctcgtatgttttaacgaagtcgtctttcatccgcgcatcgatgacgctgacgatcttggagagcgatctgcgcgccgagttcagatcgtcgagctgcgaagccatatagtcgtagcgccgcttgagctgttcgtattcgaccgccgcatcgggattgatcgttcccatgttggcgatgcgacgcctgagcttgaacgtcttatcctctgtttcagcgcggttttcaagcggaggcgtcgcgagcgccgtttcaagcggcgtcttgcaatcgttcacgatcgtgccgatagcggcctcgacctgcacttcgagacgccccttgtccacgcgggcctgcgagagcctctcgttgtccgcatcgaaagcatcgtgggcctcgcggctcttcttgcgggcctcgctcatcgccgcatgaagcccgctcgaggaatcctgagccgcaagcgtttcgtcctcaaggcgctgcgtccacttcttcgcgctgtccgacagctcctcgaacaccgcaagcagcggcacgacgcgcgtgcgtgcgagcgcctttttcgccaaggtgtccttcgccgtttcgtcctgggcgatgatcgactcgatctcgcgctcgcgcgcttcgacgacgcgccttgtgtaggtttcgcgctccgccgacgtcgccgccgccaaacgcgcctcggaaaattcgttcgagaggtcattcgcccgctttctgaggggcgacacctcttgctggaaacgcgccgtgttccgcttagcctcctcgagcgatttttcaagctcggcaagcttcgccaccagttcgtcggcagtcggctgcgcagtcttgagcacctcctgcgcctcggcgcgctggcgctcaaggtcctcgaattcgcgctggagcgccgcgagcttcgcttcggcgcgtttcaactcctctttcgaggaatcggtctggcctttcaactgcgccagatcctgggaaagctttaggctctccccttgcgcctcgcgcagcgccccgtcggccgcatcgcgcgccgctcccgcctcggcctgcgcctcttcggcttgcacgagctcgcctctcagctcttcgatgcgacggtgccgggccaaggcgccctcctcgtcgtgctggttggcgccgacgatcatctttccgttcggccatatcgcaaatccgtcgcgcgtggcgaaacgcgcaccgcccgcggaagcctcgtgagccgctatcgcagcttccctcgattcgcacaggtacacgtcgccgagcagaccctcgacggcatcggcgcattcctcaggatactcgagcgcatcgaccagccgttcgccttcgcaagtttcagcaactggggcgcgcatcgatttgcgaggcagcaaaacgacctcgcccgtctcctcgactgcgcacagcgcctcggcaataacgttcgcgcttgcagtgtcggacacgaacagcgccgcaagatcgccgccaagcaaatgctcgacgagcatctccgagcctttcggcgcgattatgacatgagacagaggctcgatgcccgcctcgaattcctctcggtgttccataagccacgaaagcgccggaccggccgcctcgctcgcccgctcgacctcctcgagcccgcggatctccgatgcgagcatcgatgcggcatcgcgtgcgccgtcgaacgcctcgcgcgcctcttcgcgagccgcaaatgcatcggatacgctctggcgggccttctcctcaagctccttgagctcggcgagcttacgctcgttggcttcggctgcgccatgggcgcggtcgtaatcgcttttcgcatgggccagctgtatctcgagctctttgctgtgcccggcgatgagcttttcgtgggcgcggctgttggtcaacagctcgttggtttccgcttgggcaagacgcgtcgtctcgatctcgcgagccagcgatttttccttgcccgaccactcctgcacgcttcgctcaagcgcagagcgcttctcggtaagatcgcgctgctcggcaagcagcgcctcaacctgcgcatcggccttccgcttctcggccgcaacctcttcgagctgctctaaggcctgcgcccggtcctcctgggcctggcgcgccttctccttgttggcggcaagcgaaatctggatctcgctctcgtagctcatggcggcgcgctttttctcgtgaagcaaaagcgcagtcgcgtcgaagcgctcgagcgccgattgcgcgcggcggtactgccgcgacaactcgcccgtgttcacgtttcgctcttggatcctctcctgcaacgcctcgatctccttctcgtaggcatcgatcgcctcgcgcatggaaacgagttgaccgtcgagatcccgttcgagctcggtcgcctttccccatttctcctgcagcatgcgcaggtcatcgactgcaagcagcagattgagttcggcgagttcatcggcgagaccctggtaggcctgcgcgcgcttcgccttgcgttcgagcggcttgagctgcctctcgacctccgccgccacatcgcgcacccttgcaaggtgcacgtccatctgctcgagcttgcgctgacttttgagcttacgctgcttgtgcttgagaacgcccgccgcttcttcgatgatggcgcggcggtcttccggcttcgattgcagaatcgaatcgaggctgccctgggagatgatcgaatgggttcccgtacccaggcccgaatcgtgaaggatgtcgagcacgtccattcgtcgggcgagcgcgccgttgatcaggtattcgctctcgccgcttcggtacatgcggcgcgtgaccgccacttcggtgtagtcgacgggaagcgttccgtcgctgttgtccaacacgagatcgacctcggcgatgcccacgctcttgcgcgccgatgagccggcgaagataacgtcctccatggcctggccgcggaggttcttcgcattgcgctctccgagcacccagagaaccgagtcgtagatgttcgacttccccgagccgttcggccccacgatcgccgtaatgcccggctcgagcgaaagcacgctcctatcggcaaaggatttgaaccctttgaggacaagggattttaaatacacgtctctttactcccggtttttctgtttgctttgcttattctgcttggcgcggtcccgctcgcttttcttgcgggccttatcctcagccttcgctgcagccagcgccgctttcgcagcggctttttccgtgcgggccgccttcgcgtcggcgcccaaaccgaaaaagtcgctcaagcgggccaacgtgcttttcgcggcctggctctcggcttccttcttcgtcctgccagtcccccgcgcaaggccctgcgttcccgcaaacacctgggcgacgaacgtgcggtcatgcggcggtccctgcgtttcgacgagcttgtaggtaggggttatgccgtcttcctgcaacttttcctggagagcgcttttgggattctcgggttctcttgccatatcgagcgacatgcgcggtatcagcgtgcgctcgacgaacgcggttgcggtctcgatgccgccgtcgaggtaaagcgccgcgacgatggcctcgtacacgttttcgagcgcggagtgcagaccgcgcttgcccgttcccgtctccgacgagccgaacacgatgatttcggcgaacccgagctcggcagcgacatcggaaaggctcgttccggaaacaagcgccaccttgatgcgcgtcagaccgccctcgtcaagatcgtggaaacgatggaacgcctctgtggccacgatggcgccgaggatgctgtcgccgagaaattcaaggcgctcgtaagagaacttgaccgactttccctcggtagcagaaggatgcgtgatggccgcaagcagcagttccttgtgcacaaacgtatacgacaggatctcttgcgcccgcgcgagtttttcatgctgttcttcggagctcgtcatcccgatcaccgatctcccgcatctgccgacccctgtccgggttcggcctgtttcgaagagctcttgcatgcaaccgtctcggcaatcgtctcagatactttggtacggacgatgcgggccgtcgtgtggatgccgtttttgacggcggtcgcgttcgatgacccatgccccacgatgcaggcgcccttcacaccgagcagcggcgctcccccatacgtgtcggggcttacctgagccatgaggtccttgaggcctcctttgatggcgagcgcgccgagtttggtgaagacatttgaatagaagatgcccttcagcgccttgaacagcgtcttcgacgtcccttcgatcgttttaaggcagacgttgcccgtaaatccgtcagtcacgaagatgtcgtagttgcccggcaggatatcgctcccctcgccgttgccgacaaaattcggaacctgctctttcagcagcgagaacgcctcctgtgcgaaagccgagcccttcgtatcctcttcgccgatgttgagcagaaccgctttcgggttttcgacgccgatgatcttttcggtgtagatggttgccatctgcgcgaactgcacgaggtattccggcttgcaatcggcattcgcccccacgtcgcacatcacaacgggcttggcgggcgaagggatgaccgtgcacagggccggtcgcgaaacgccttttatacgccccatgacaagcgttgcggcagccaggcaagccccggtcgagccggcggagaaaaacccctgcgcctcgccttccttgacgagccggcatcccacgacgatcgaagaatccttcttcttgcgcacggcgttggcgggatgttcgtccattgcgatgaactcggtcgtcgcaacggctttgcagcggtcgtgctgcgcggcgaacggctcgacggattcggcgggcccgcagagcagaatatgaagatctgcatcttcggagagagccgcagcgacgccgtcgagcacgacatcgggcgcgtgatctcctccgagcgcatcgaccgttaaggtaacttgttcagacatcgtttctccttgcgttgcagacggcgcaatgcgccgttgcgtacccggtcggccttgcggccgcaatcaattataagcaaagagcgggcatcgtcggcaccatcggtttttctttatccgaaaaccaaatcagcatacgcggtacgtgcccgtgcgggacccccgcaacctcggacacagtcaacgcagcaatcggcgcaacgggaagattccgctccgcacgcaaaacgaaacgaagctctcggagatgccttgcacaaggcagcccggagagcttcgcttgcctacccgagcggatcttgccgcacggatgcacgagccgaggttactcggtctcgatgacttcgcggtttttgtagaagccgcagttcgggcacacgcgatgcggaagctttgcttcgccgcactgcgggcacacggaacgagagggtgccgcaattttgtcgttagcactccgacgggcattggtgcgagcacggcccattttacgcttaggtactgccatgatccttgtactccttttccaagccggactgactgcccggtattaaaaagcaatcgttaaacacgcgaagaatattctaacaaacgcatctccctcgtgcaatatgggttttatggaatccgcacgtaaaataggcgctacgatccgaactgcatgcggtaatagcgcgcataggtgccgtcgatcccgataaggctttcgtgggttccgaactccacgacccggccgtcctcgaccacggcaatcgcatcggcactcctgatggtcgagaggcgatgggctatcacgagcgtcgttctgccgcgcgacagatcttcgagcgattgctgcaccttgcgctcgctctcgttatcgagggcgctcgtggcctcatcgagaatgaggatgcgcggatccttgagaaacacgcgcgcgatcgcgatgcgctgcttctggccgcccgaaagacgcgctcccctctctcctacgtaggtgtcgtagccatcttcgagatcgcagatgaattcgtgtatgttcgcaagcgatgccgcatgctcgatctcggcgtcggttgcctcgggctttccgtaggcaatgttctcgcggatcgtgccgtcgaacagatacacatcctgctggacgatgccgatcgcctggcgcagggagcccaccgtcgcctcgcggatgtcaatgccgtcgatcgacaccgtgcctgccgacacatcgtagaagcgcggcagaagcgagcaggtggtagtctttcctcccccgctcggtccgacgagggcaacagtcgagcctgcaggaacatgcagatcgaggccttgcagcacctcatggtcgccgtcgtaggagaagcgaacgtcatcgtagcggatttcgccggtgacctgtccgccggtatcgcatcgaagctcgcgctcaaggtcggcgaggtcgcgggcaccggaagcgtcttcgatatcgggacgcacgcgcagcacctccatgaaacgcctgaagcccgcatatcccttttggaactgctcggtgaaattgatgagctgctcgaccggagagacgaatatccctatgtagagcgcatagatcgccaaatcggtcacctcaagcgcaccttgcgcgacgaagtagccgccgcccacgatggtcacggtgtacagaacgccgatgaaaagcgagttcaccgcatgaaacgatcccatgaaccgatacgacagctccttggtgtcgacgaagcgatggttgctctcgtcgaacttgccgatctcgatccgctcgttgccgaacgatttcaccacgcggattccgccgagcgaatcttggagcctcgcgttgatatcggccatcttcttcctgttctcggtgaagatggtccgcttgcggtagttgcgccaaaacgcgtacgccgccatgacgaccgtggcagccagcataatgagcgtgaggggcacgttcacgaggaagagaagcgcgaacgagccggctatcttaagaatgcagatgaacaggttctcagggccgtgatgtgcgagctccgagatgtcgaacaagtcggtgacgagcttgctcatcatggttcccgtgttgttgcgatcgtagtacgagaagctcaagcgctggtactgctcgaagagatcgcggcgcatgtcggcttccatgcgtgctcccatgatgtggccccagctcgtgatgaagtactggcacgccgtgcgcaccgcatacattgccgcgagcagaacagcgataagcccgagcgacgcgacggtcgtatcgggcgcctcgaggaagaactccttggtgaaaaagttcagtatctggggaaaggcgagatcgacgagcgccagcaccgacgcgcagaacagatcgaagaacagaagcgcccgatagggcctgtaataagaaacgaacgcgcccacaacttccagggcgcgcacggtcggctgagctgcttcatcggctggctgcatacggtctgtccggcgcatcaattctcgaacggaaaatttttgagcaccgaaaacggattcttcgccccatcctcttcgccgtcatccgtttcgccgcaagagcagggaccctcgttgagatcggccccgcaatcaggacagatgcccttgcagtcgtcgtcgcaaagcggcacgagcggcatttcgagcaacagggcggcctttatgagtggatcgagttcgatcacgttgttcttcggaagatacgagaattcgtcgtcgtccatgtcttcgggcgcctcctcctcttcggaaagaaggaaatagccctcgatctcgccggtgacgggaaactcgaaggtgttgagacaccgcgcgcacgaggttttagccacgccttcgaccgttccggtcaccagcagggcgccgcccgtgttggttacggtggcttgccatacaaggggacctgcgaactcgtagagatcggggcccgccttgagtatgccggcttcgtacgtaccctcaaaacaagaactctccgcaggggcgaagagctcgctcggtaccagtatgcgggtatccgacattatcgtcccgccatggaattcgcgttcaaacgatcgcgacaacggcgaacgttgccgatcagcgtatcgaggctctgctcgacatggccgaacacctcgtcggcgtagtcttcggcaccggcacgcgtctggcgctcaagctcgcgcgcatcggccatgatggtttcggcctgctgctgggaaatgcgaacgatctcctgttcgctggcaatggtcatcgcctggctgcgcgcgtcgtcgatcatgcggctcgcctcggcttccgcatcgtcgagcaagctctggcgctcgcgaacgatctgacgggcttgggagaactcgctcgggaacgtgtcgcgaatctcatccatgatctcgaatgcggctgcaatatcgacctggcgcatgttgcccttgccgaaaaccggcttagaatcttccaagaggatagagagctcttcgagtaagcccagcactcccgtttcgtccattgctgtccttccaaccttgctgctgcgtttgaactgcgtatatgggtatgaagcgttgcttcggtatacaccatcgcgatattttagcatgaagctccataaaatcgaaactccctgcataaaccgcacatttgcgtcaacgaagggttacgctgccgtcagcttgcgcccgaacgcgggcgcctgtgcgccgatatcctattcggcgtactttctttcgagggcatctttcacgcaagcaggaacaaattcgctcacatcgccatgaaggctcgcgatctcgcgcacaaccgacgacgagagatacatgtactcgggcggcgacatgatgaaaagcgtctcgagatttcggtctatctggtagttgatggcggtcatctgaaactcgtactcgaaatcggtgatggcccgcagacccttgatggccaccgtaacttccatgcgctcggcaaaatcgaccagcagctcgtcgaacggctcgacgctgacgtttggaagatgagcggtcgcctgccgtgcaagcgcaacgcgctcgtcgagcgtgaacagcggttttttcttcggggaagccgccacggccacgatgatctcatcgacgagctgggcagccctcgttatcacatccaagtgcccttcggttatggggtcgaacgtgccgggcgtcattgcgcgtttcataacgagtcgtgcatccttccaaacagggcgattgccgtatcgccgtagtgctttttcgaaacggtttcccattgtagcgattggaatgcgccctcgacggcagaatcgtccgatttcgcgtattcgtacgaaacaagcgcgccgggcgcaagcgcccccgccctgtcgagctcatctacaaagcgcgagatctcaaccgggtcggttgcataggggggatcgagaaacacgaggtcgaaagccggcctcgcataaatcggcggctttttcaatacgtcgccgcgccgaagctgcgcacgcgaaccgcgaccgggcgcttcgacgccgatcgcacggatgttgtccgcaagggttttgatcgccgcaccgtcgcgttcgaagaactgcgccgacgccgcaccgcacgacagcgcctctatcccgagcgcacccgatccggcgaacgcatcgagcactactgccccgtcgaacccgccccgggcgcttgcgataacgctcatgagcgcctcgcgaacccgatcggtcgtcggccgcgttccctcgcccttcggggctttcagcacccgaccccgatattctcccgcgatgattcgcaccgctatcctcccttaacctcgttcgccccccgaaacgcgagcctgacctcgcgcccgagcgcacggtaccgatcgctccgaagaccggcgtcctctgcgagcatcgcacgggcatcggcatgcgccgcctcgattatcttgccgtcgcgcaccacgttgaccagcttgagcaccgatgctccatgctgccggtttccaaggatgtcgccttcgcgcctgagcgagaggtcgtagcttgccagctcgaatccgtcttcggttttctccattgcggcaaggcgctcgagtgcgcagggcgccttggatcccgatatcagatacacctcgcccggctccgtcccgcgccccacgcggccacgcagctgatgaagctgcgaaaggccgaagcgctccgcatcctcgattatcatcaccgtggcattgggaacgtcgacaccgacctcgataacggtcgtcgccacgagaacctggctctcacccgaacgaaagcgctccatggcctcctgcttctccgctccgctcatcttgccgtgaagcaggtcgaccttgtaatcgacgaaggttttctcctgaaggaaccgcgcttcccgaacagccgccttggcatcgtcttcgatatccgcctcgtcctcgatgctgatgaccgcgtattcgtattcatcgtcggcctcgagatcgttttcccgcttcgctttccgctcgttttcggatccgggatgaggctttcccacaagcgggcacaccacatagacttgatgcccctcggcaagcgctgcgagcgcggcatcgtaggcgcgaccccgctcggtcctcgaatacaccttcgtctcgttcccggcggcgttgagcgggcggttttttatataggagagcgtaaggcttccgtacaaggcgagcgcaagcgtgcggggaatcggggtggcagtcatgtacagcgcatcgggagcctgccccttcgcaagcagagacgcacgttgatcgacgccgaagcgctgctgctcgtcgatgacggcaagcgtgagatcggcgaagagaacgtcgtcttcgagcagcgcatgggtgccgaaaagaacatccaccgtgccctgggccacccgtccgatgatagcctcccgctcggttgcgccggtcgaacccgtgagcacctcccaggtgatgcccgccgcatcgagcaagggaccgagcttttcggcgtactggcgcgccaaaacttcggttggcgccatcatggccgcctgcgtgcccgtatccgcaacggccgcaagggcgaatgaggcgacgatcgttttgccggtgccgacatcgccgaggagcatatggttcgcagcctgcttcgattccataacgcgcagtatgtcgtcgcgcgccgaaacctgctcgtcggtcaatgcaaacggaaggttttcctcaagcgcccttcggtgcgccccgtcggtcacatgggcggttgtcggcttgccctcgctgcgctgcatctcgtccatcatgagatgcaattcgagcatgagcacctcctcgtacaccaggcggcggcgcgccatccctacctccgccatcgttgtcggaaagtgtatggccgaaagggcgctcatcctgctgggcaggcggtatttcgtcctcagctcgatgggaagcgggtcgagtgcacccgcgcacgaatcgagcgcgtttcccacgagcctgcgcatccaggcagtcgtgattttctccgtggcaggatgaacggcgatgatgcgtcccgtcttttcgtcgaaggaatcgcctacctcttcgataaagggattcgtcatgcgtttgaacccgtaattgaattcgagtttgcccgataccgcgagccgatcccctttctcgatttgatccatgagccagggctgccggaaacaggtgatcatgagcacgccggattggtcggtcagcgcaatttccacaagcgagaacttcggcttgggttttttgagcttgatttcgtgcaccgtgcccgcaatagtgaccatctcgccgatgggggcacgggcaacatcggcgatacgcgacatatcgatgtagcggcgtggaaaatgggtcagcagatcgcgtatcgtgcgcacgcccagcttgtcgagagcgcccgccctcatagggctcacgagccgaacgcggctgaccggctcgtcgaaggccaaggtagcagcaaggcggtcgagggaagtctcccccgccgccttgccgttgggtgtcgatgtggaatgcccgctcaaacgacttgctgccaactccctattcgaccgacatcacgatgggatagagcggttgttcgccgcgatgcgaatcgatctcgagatcctcgtacttttccccgatggaggcgatgagcgcgtcgaaggacgcatcgtccatatcctcgcccgcaaggatggtcagcgtatcggcgtcttcggcatccataacctcgagcagatccatcacgacctgctccgtcgaagaaccgaccgcctcgatcgacccgtcggcgatcccgatggtatcgccttccttgatggggttgtcatgggcgtctttggcatccttgatggcaacggtgacctcgccggtcttcacatcctcgtaagcctcggtcatcgattcgacgttctcctcgaggctcgccgactcgtcgaacccgaacagcgccgaaaacgcctgcggaacgctcgtggtgggaacgaccgcgcaaggcacctcggacaaacccgcgcagctctgcgcggccatgatgatgttcttgttattgggaaggatgatcaccgcatcggcattcaccttgttgacggcatcgagcaggtccttcgtggaaggattcatcgtctgcccgcccgaaacgaccacatcgacccccaaactctcaaggatcttggcgttccccgctcccggtgccacggctacgaatccgatcggcttgtgctcggcttcggcctcttcggcggcgagtcccgctgcgcgcgcctcgctttgcagctgcatgttgtggatgtgcacctcagaaatctgaccgcgatcgaggaagtacttgagaaccttgtcgggcgtgttcgaatgaacgtgcaccttgaacttcggcgtctcccccacgcacagctcgcaatcgcccatcgtggccaaaaagtcgagcgcctcgtccttgtcgagtgaatcggaatcaacgaggaactcgttgcagtacctgaattgggaaccctcccaatcgttcacctgctcgatctcgaccctcggcgccgttccgcgcgcaaacgccagctcgtcgaccatcgggccctctttgccgatgagcgccgatgcgaaggcgtcgaacaggatggcgagaccgaagccgccagcgtcaacgacaccgttgtctttgagcacgggaagcagatcgggcgtccgctgaaccgaggcataggcttccgacacgatggactcgagcgcctcttcgacgccgagcttcttcttgcgcgccctcttcgccgccgaggcgctgtccttgagcacggtgaggatcgtgccctccaccggctttcggacagcctggaaggcgacttcggcggagtgagagaacgccgcgtcgaggctctcggtcgaaagctcttcgaaatccgcgctcccctcgcacaggccgcgtaaaatttgcgaggtaatgacaccggaattgccgcgcgcacccatcagcgcgccggtcgtgattgccttgcgaatttcagctccgcttgctccaatgggcagttttgccacgttgtcgacgaccatctcgaccgtcagcgacatgttggtgccggtatccccgtcgggcacgggaaacacgttgaggcggttaacctcatccttgcgctcggccaacgccttcgatgcgaccgctatggcgttgagaaggtcgttcgttgtgtatgattctggcatcttgagtcttactcctagcttgcatccgcgcataatcccgcccgggaggcgcagtcttccatataccgttcgggttacttgcgcaccttgattccctggacgtgaacatcgacgccgtcgagcggaacgcgcgcgtactccgtgagcgcgaacgaaacctgatcgatgaggttctgggatacggcgttgatgttggtgccgtattcgatcacgacgtacagatcgacgtggacgcccttttcggtagttgtgacgataacgccccgacgcagcctcgaggcaggcagtatcttcgcgattccgtccgctgccgttggtgccgccatgccgacgacgccgtagcactcgagcgcagcattgccgacgagatcggcaagaacgtcgttggcaacgtggaggttgcccggaattgtctgagtcatgatggtcctttcgcgaacaaacttgctacggttcgtatatgtgcttagactagctaagaagtataacgcatggggcagatgctgtgcagaatgcctgataattccacgggcgataatacactaaaaattcttgtatgcgtaagatttcctgtggtatagtgtttaggcttttttgtcatcaacggtatattgccgaaacgtacatggagttgattgagatgtctaaggtttgtgaaatttgcggaaaagctccggtcgccggacgcaacgtcagccactcgcaccgagtgaccaaccgcgtcttccgcccgaacgttcagaaggtcaccgtgaagatcgacggcaaggtcaaacgcgccaacgtatgcacgaagtgcatcaaggccggaaagatcgagcgcgcctaaagctcttctgttccccttgccctaaagctcgcctcgcggcgggcttttttgcgtttcctcgaatgtacgagagcgtcgggtcggaagcccgagcaggtgcccgccaaccctcaaagggagcgagacgtctggtttgcccacacccttcatacggcactttgcatttcccttggcagactttcatgcatgcagcgatcgaacgttggtcccaatgcgacagcggagcaggcaaaaatggttgagatttacggtttgggcagcgatgggggcaaacgaagacctcctcggcaaagcgctcttcggaaaacacctgatcgcgaatccctgagaaacaaccggcattgcccaaaccgtaaatctcaaccattttcggaagaagcgttgccatcgatcggttctgcttgccagacgaacaaccctctcagcaaagcaaaacgcgcccggttccgtgaatccgggcgcgttcatcgcatgcttccgccgatcgccgctcagcggcgacagtcctacgggcggtacgccacgcgggcgatcgggctttcccatacggcaacctctttgagcgagataggtgcgggcagcgtcttttcgagttcgtagaagataacgcgcgccatgtgctcggcggtcgggttgatcacgtcgaacggcgcaacctcgttgatgcaccgatgatcgaagttctccagaatcgcatggagatcgcgcttgatcgctttgaaatcgtaaagcatgcccacatcgtcgagatgctgccctgccagcgtagcctcgatatcccacgtatgcccgtgcaaaaagcgacaaggtccatcgtagcccggcagcgcatgcgctgcatcgaagtgatcttttacggtgagctcgtagtggccgcccgtatgctcgtaggtttcccccgaaagccggccggggccggtataggcgggattgcgttccattgtcgttcctttctgggattcgccgccgctgtgcacgcacgcctcgcccgaaagcgaatcgaggcgctgcccgtcgggatcccccgacggcttcgaagcgcacgcatcgcccgaaagacccttcgcgctgaacgcgtcgaacgatccggcaggcgccgtcgcagcgaccgcagcggcgcggtctttttcgggtcgggcatttacgccagcatcgaaatcaaagagattcgccggagcatcctcccatgcgacaagatagctcccgacagggccccgcgcatccatcgtctcgttggcgagggcgtctgcgcgcttgttctcgtttctgtacacgtgggcgatcgaagccttgccgaatcggccgaacagatcgcgcgcctgcatgaaaagaggtttgagatcttcgcttttcaccttgtattgaccgagcatctgcttgaccataagctcggaatcggcacgcaccgcgatatcggtcacacctgcggccaaggcgttcctcaagccccagaccagtgccgagtactcggcgacgttgttcgtcgccttcggcaggaaccagccgcccgatgcgatcgacgagccgctctcgtcgacaagctcgaacccgaagcccgccggccccgggtttcccctgctgcctccatcggtgttgaggtaggccttcatcactcgcccaccaccagcatccgcttgcaagcagggcacgtgctcagcggcgcctcggcctgcacctgcaagagctttccctcggtaatggccgcgcggcatacgctgcacgatccattgacgaggcgggccaaagcgatcccccccgatctgctcgcgatcttctcgtattccgcaagcagatcggcaggcagcgcagcagccaactcagagcgcttcttctcggccgaggcaatgccggaaccgaggccgccaccctctttctgaaacgatgcgacgtacacgttttcctgcttgacgattttttcgagcgcatcggtgatctggctttgcacctcggagatttggaccagcttcgcgttcgcttcggaaagatcctcttcgagcgtcgtgcgccgctttgcaattccgccgagatctttcgtcaacgcctcgacgcttcggtaatcgccccgcgaaccatcgatcttctcctgcgtttccgcttgacgggccgcaaggcgcccgtcttcgtcttttatgcgcgctacagcgagatcggcttcttttttcatagccgcgatcttcgcctgcttctcttcgaccgcctgctttttcgtgcgaatctcgaggatctgcgcacgctgaggcagctcggcaagcttcttccgagcacggatcagttccatatcgatatgctgcatgttgagcagcgtggccagatctttcgtatctgccttcataggctcatccttacatcctggtcgtttcggggtacatccaattcgcgctctgatcgagcacggctatcttctccttcggcacgcccgcggcctcgacggccgccgccaacacggccacgaggggaagctcgctcgtatcgtgacccaaatcgacgatggcgagccccgcccgcgatgccgcaagtgcatcatgatacttcacttctcccgccacgaggcagtcaacgccgagaacgaggcatttcgacggaagatcggcagcgctgcctgtgcaggtgacgaccgtcgaaaggctcttcgagaaatcgccccatacgcgcggctgcttgccgaacaccgacgtgcaacgcgctgcgagctggccgagcgtcaaaggcgcatcggcggcacgcaccgagcacagctggccatagccctttttcttgctcgtctcgatcggatcgacgatccctttgaaagtaagattgagcatgccgggaagcgcacgcgccgcatcctggctcacatcgagcgcggtatgatacgacatgatcgcgacgccgttttcgacagcagcccagacgacggccccgtcgatttcagcacttgaaggcgcaggctgaaacttgctcggcgcctccagaaacgtcgggtggtgagtgacgagaacgttggctccgagagcagccgcctcgcgcaccgcctcgaccgtggggtcgagcgcgagcgcaaccgattcgatcgcgcgcgtgggatcccctaccgcaatgccggtcctgtcccagtcctccgcatcggaggcggggtatttcttgagcagggcctgttccaatgctcctatgttcatggtgaacgcctgcttcgacagcgttcccgatgccctttgcgcaagtccgttcttcgtcttttcccttcgagatgtaaccatggcaacctcttttcctcggcgagcggtttactcgattgtaatgcctctgagacccccatcccgtgtcggcaccgtaacctcgcggtaaccagcttcgtacagagcacggtaccctttttctatgtcgcgggcaaccagctgcggatcatgcgcatcggtgccgacggtgcaggcgatgccggctcggcagaattcggcgagcaacgccggcgaggggaacgcctctgcacatgtgtaatgccatcccgaagtgttgagttcaatcatcctgccgctctcgaccgtcgcctcgacggcatctcggtacagcggcatcggatcgaacgacgggcggaacccgaacttcttaaccagatcgggatgagccatgacagtgaagggcatatccgaagaaacgcattcgcaccacacttcgaaatagcgtttccatatggcatcggcgcccacttcgtcccaatggctgcgctgggcgggatcatcgaagggccaggtatcgacgaaatgaaccgatcctaaaaccacctcgaagcggtcgaactcgccaggcgagaacacgcggtcctcgtccgacccgagccagtcgagctcgcatccgagcagaatctcgatatcatcgcaacgttctcgcgccgcttcgacatcggcgacgtattcttcgagccgactatgcggcatcgatacgtacgatgtcggatcgatggctttcgaaagcggatagtgctcggtgatcgcgatcgtcgtgatgctcgcagcacgggcagcgtcgacgagctcgtcgacgctgccccttccatgcgccgtatagccggtgtgcgtatgcaacgtgacaagctccatgcctacatccccctcaggctttcttcgaatgcgatcatgaacgattccacatcctcttgttcggtgcagcgcccaagcgatacgcgcagcgagccgagggcgcgatcgtccgaaacgccgatggccttgagcacatggctcgggtcgagcgaatgcgacgagcaggccgagccccccgaaacggcgacggccttcatgtcgagccgcaagatgagcgtttcgctttcgaaaccgtcgacgcacacgtttacgatatggggtgcgaaatcgcggctgtcccgctccacctcgacgctcggatgaacgcacgcgatcgacccgaggcgctcgtaaagctcgtcgcgcaaaccgcgcaggcgcgcggcctccgactcctgcatcgagcaagcggccctgcatgcagcggcaaagcctgccgccgcgcagacgttctgcgttccgctgcgcttgcccgactcctgcccgcctcccacgataaacggcgaaaacggcgtccccgcgcgcaggtagagcacgcccgaacccttcggcccgccgatcttatgcgccgaaaacgaggccgcatcgacgccgagctcgcccatatcgacgcgaatcttgccaagcgcctgcacggcatctgtatggaaaagggcgcccgctccgtgggcgagcgccgcaagctcctcgacgggctgcaccgacccgatctcgttgttgaccagatgaaccgatacgagaacggtgttctcccgaagcgccgcctgaagcgcgcgcacctcgacgaaaccctgtctatcgcaaccgagcacggtcacctcgcaacccatgcgttcgagcacgcgggcggctgcaagcacggcatcgtgctcgatagccgacgtgatgacgtggggaacgaagcccttctcccctcgctgcctcctccgctcggacgaagccgctacgataccgaacaaagcggcgttatcggcttcggtcgcccccgacgtgaacacgatctcgtcgggccgtttcgcaccgaggtcgcgcatgatcgagcggcgcgcctcctcaagcgcgttgaaagccgtccgtccgttcgaatggagggaattcgcattgccgcccgccggcaggttcgcggcccccggcaccataaagggggccattgcgcgggcggcctcttcgcacaggggtgcggttgccgcataatcgaggtagatctgcctattcacggacgtccgcctcccgcctcgccgcttcggcggcggcggttatctcggcgatggcgacagcgggatcgggtgcgccgaacaccgcgttgccggccacgaggacatcggcgccgcaagacgcaaccagcccggctgttttcacgcccatgccgccgtcaacctcgatcaggggattcgctcccgcctcttcggcgagcgcaacgacttcggcaacgcgagcatcgctgccctcgatataggattgccccgagaacccgggatacacgctcatcacaagcaccatgtcgagcgatccgatatggggggcaatccgtgcaacgggcgtgtcgggcttgatgctgagcgccgctttggcacccgctgccttgatcatgccgatcgcctgccccacttcgccttcgacctcgtcaagcgcttcgagatgcacggttacgatatcggcgccggcatcgaggaaccacggaagctgcacgaggggattcgagatcataagatggacgtcgagcggtatcgacgcgatctttttcagctgcttgacgaagggaacgcccagcgtgaggttgggaacgaagtgtccgtccatgacgtccacatgcacatagcccgcgcctccccgctcgatcgtttcgatatcggccctcatgttcatgaagtccgccgatagtatggaaggcgcgatcttaaccggttcaaacatgctcttcaatcctttcttcgctacgccgattgtagcgtaagccccgcatactgcgatcgggttcgcccctcatctgaaaaagcacatggcggaaagcgctgccgccgccaaaaccccgccttgggccaaagcgcgccatccgtgcaagaatcgctgcgtacgcggttgtcacccgttcgtcacgcaacgacggtttcccctgaactataatgagccacacgtctcgaagggagggtcatcatggcagcggtttcgcatacgttcttcccgtacgtcacaccggtcggtcacatcaccatcgcagcggacggttcgtcgatcaccgagatagcgtttggaaaaaaacagctcgaaggcgcagagaggccgaccgagctcaccaatcgggcggcaaaccagctccaggagtattttgcgggcaaaaggacggctttcgaccttcccctcaaccccaagggaacgccgtttcagacaagcgtctgggctgcgcttgcagacatcccctacggcgagacgagaagctaccgggagatagccgaagcaatcggaaagccccgagcgcaacgagctgtcggcggggcgaacaacaagaaccccctgcccatagtaataccctgccaccgcgtgatcggcgcaaacggcaaacccgtcggatacgggggaggcctgaagacaaaggagtttctgctcgatctcgagcagaaggcaaacaagcaccaagactaggaacctatctgcatgaacgtctataccaacaacatcgtcacggcggccgtcgcatttcccttcatcgccttcgccatcaccgtcccctacatgatctaccagtaccgcaagttcggatcgatcccctggcttcgcaccatcatcgtatactcgttcgtcttctatctcatgtgcgcgtacttccttgtgatcctcccgcttcccgacgatcggtccgccgtggtcgcctacgctgccacaccgcagcttttcccgttcaacttcgtccgcgagtttctggcgcaaacgacgtttaacgcgggcgacccttcgacatggcttgctacgctgcgcgatccttacgtatacgaagcgatattcaacgtgctcctgctcactccgctcggcatgtacctgcgctactatttcagacgcacctggtggcagacgctgctcatcggtttttcggtcacgctgttcttcgaactgtcgcaactgacgggcctgtggggcgtctacgcccatccgtacaggctcttcgatgtggacgacctcatgctcaacacgctcggcgccatggtgggcttctggatcgtgggacccgccctgcgattgctgcccgacatccgccttgtcaacgaagaggcacgcgaggcgggaatgagggcaagcgccacgaagcgcgggctctcgttcttcatagacgtcttcgtcgcgcagaccctctcctcgatcgtcatcggcgggtttgggaccgcgggcctcgaatccgtcgcccgttctcagggaatatcctgggggcttgtcagcatgtcggtcgatttcctgttctacctgctgtgcttcgtcatcgtgcccgtcatcacgaaaggccaaacacccagccagatgatcctcaagctccgcatcgtgcgacccgacgcgagccccgctcgctggtatcaatatctggcgcgctacggctttctctatgtcctcgtcctcgccccgcttctcgcgctgaacggcatcatctccctcgacccctcgcgcatgcccgaaatgggaatgctcgcttcggttatcgccgaccaccgcgcggcgctggtcgtttgctggatagcgctcatgtgcgcttgggctctatcgctgatcgtccgggcgatccgctccgccgtgaagaagcgcccgttcgtcatgctcaacggaatcctaagcgccacgcgcgttatgacagacgaagcggtgggcgtggagcgcgaccgcaaaaatccgctcgacgtcgatgaggtttccgcgctcgaatcgctgatcgaagaggggggaacgccgctttcggaactgatggaacgagcaggtatcgccgttgccgacgaagttcgcgcctgggttcccgaccccgtgcccgtcgtggtgctggcgggatcgggcaacaacgggggcgatggctgggtatgcgcccgcgcactggccgaggcgggttacaaaaccacgctggtaacacccgatatcgccgagcgcatgaaggcggaacccgcccgctccacagcgctggccgtattttcctcggccagcgaaaacgacctgccgctgagcgttctcgtcgcacccgacgccgatgtgctcgccgacgcgctggacgacgcgatggcaatcgtcgacgccatattgggaaccgggttctcaggaaccgagctgcgcgaaccgtatgccggctggatccgcgccgcgaaccggcgcaggttcgaggggtcgcgcgggaaagggcggggcttccatcgcaagcgccgattcgaacgggcggatcatgaccgtgcgcgccgcagcctgccccgcaaagtcaaagatgcgccgtttgcggttgccgtcgatgttccaagcggactttcggcgcagaccggagcccttgcccgccccacgttcgtggccgatgcgacggtgacgatgctcgcctacaagccgggtctcgtgaagccccaggcgacgcgctacaccggaaccatcgagcttgcacggcttgtggacaccgcaccctatacggcgcgcctgcgggaagcctgcggcgatcggtaaccgcggcgcatgacgcagaagcgccgggccatcggatgcatcgctgacgctgacgtcgtcggcaagcgtgagcttgcgtctgccgccttcgcctttcacagcgacggccgcaggggctccgctggttaaattccgtaaaactcggttttaagcggtcggcttgcaagatcgagcgcggcttgcttgacgtcgtcgccctcccacaccacgccgcgcacgaccgaggtgatgggaagctccacgccgtacatatcggccagcgtctgcaacgtcctgcacgcaagcgcgccctctgccaccatatgcgtggacgcggtgaaatcgtcgagcgtctttccctgcgccaccatctccccgaaccgacggttcctcgaatgctcggatgtgcaggtggcgataagatcacctgttcccgcaagacccatgcaggtgatggggtttccgccgcacgccgcgacgagcctgctcatctcggccagtccgcgcgtcatgagcagcgccgacgtgttgtcgccgtatccgatgccgtaggagaggcccacggcgatggcgatgacgttcttgaacgcagcgcagagctcgacgccgcatgtgtcatcgctcacgtaagtgcggaaggtgtcggtggcgaagagctcttggaaaaaccgcgccgtttcctgagacgacgaagcgacgacggtggccgagaacatgagcttgatcacctcttcggcatgattgggccccgaaagcaccgcaagcctgcccttccccccgatctcggcttcgaagacctcgaccggcagaaggccgctaccttcctccacgcctttcgagcagatgatcacaggcgtctcgtcggtaatgtatgcgctgatggcctgcgcagtctcccgcatgaggctcgagggggtgacgatgacgaccgcatcggctccatcgagcgccccttcgtaagacgtcgtcgccctgatccgctcggaaagggtcacatcgcttaaataccgggggtttgcgtggcgctcgttgatcgatgccacaacctcgtcttttcgggcccacagagccacgtcatggccgccgacccccagaagctgcgaaagcgcggttccccatgatccggcaccgattaccgcaacgttcatgattcctccttcgcgcacggcggccgaagccgcccgccaaaaacccaaagccgagcacttcgacccgagttgccgctatgccttcttcttgctcccgatacggttctcggtacccgaaagcagtcgcttgatgttctccctgtgagcccacacaactgtaagccccgcaagggagcagagcgcgacggcaagccagtcgccccagaagaaatacagggaaaagaacgggcacgcgagcgcggcggcgatcgagccgaccgacacgtagcgcgtggcaacgacgagcacgatgaagatcgcaagctcgaggcacgcccccaccacaccgtacgtcacgaacaagcacccgaccgcaacggcaatgcccttgccgcccttgaacttcagccatgggctgaagatatggccccaggtgcatccgaggaacgacacggcaagcagaacctgggaaaactgcgttgcaagctcggcgggatcgccgacgggacccaagcggaacggagccagtatcgccgtaagctcgcccgcaaccgcaccgtatccgtgcagcgaaaagaacagctgcccgatccagatgcccaagaagcccgaaaggaggcctttgccgaaatcgagcacgaacaccgaataaccgcccaccttccccatggttcgaatggcattcgtggtgccgatgttgccgctgccatgctcgcggatatcggtatggtagaaaaccttcgagatgatgagtccgaagggaatggaccccagaagaaacgccgcaatgaaaacgacgacgaacgcatcgatgaagtcttgcatggaaaagcctagtccttccgcttgaatttcagcttgatcggcgtaccgacgagatcgaagctatctcgcaaccgattctcgaggtagcgttcgtaattatcgtccacgatatcgggatggttcacgaaaaacgtgaattgcgggggtttcacggcggtctgcgtcacatacttcatcttgagcatcttcttgccctggctgacggtatgcccgaaatccctgattccctgaagccacgtgttcagcttgcttgtggatatgccctggctgaaattcgcatatgccgtatcgaccgcatcccatatgcggttcacgcgcttgccggtgatcgcctgaatcgatataaccggcgcatagccgacgaacgtcatgcgatcggcgattttctcgcggatctcggccttggcatcggggccctcgatgaggtcccacttgttcagcacgatgaccatcgcacaaccgcgctcggccgcgaatccggcgacgcgctgatcctgatcggtcagcccgatggatgcgtcgatgacgagcagtgcgacgtcggcgcggtcgatggcgcgcatggcgcgcacgaacccgtagtactcgacgtcctcgtcgatctggctcttcctgcgcaggccggccgtatctacgatcgtgtagaacctgccctcatgctcgatggtcgtatcgatggcgtcgcgcgtcgtgcccgccaccgccgagacgatcgatcgatcgttttcggtcaggcagttcgtcagcgagctcttccccgcattgggcctgccgatgatggcaacgttgatcgaatcgacgggatcttcttcaacctcctgttcagggaggcgcttcagctcctcgaccagctcgtcgagcagatcgcccgtcccgttcccgtgcattgccgaaaccggccacggatcgccgaggccgagctggtagaactcccacatctcgtcgaccttgttgggcgtgtccatcttgttgacggcaagcatgatcggcttgtccgatttgcggaggatgcgggcgacctcttcatcgtcggcgttgatgcccgtcttcccgtccacgagaaacacgatcacatcggcctcgcgcgtggcggcgaacgcctgcgcccgaatggagccctggaaggcatcgtcggtgcccatctcgatgccgccggtatcgacgagcgtgaaatgcacgccgttccaatcggcttcatgatacgagcggtcgcgggtcaccccgcgcatctcgtggacgatggcctcgtcggcctcggctatgcggtttacaaaggtggacttgccgacgttgggtcgaccgaccactgctactactggtaatgccatgtctattcctatttctgtctacgcttccctcgggaagcgacggcgagttcggcgccgggcttctagccgcgatgctctatgagatctgcgatttcgccgaaatactcggatgcattacaggataccacggcaaggggaacgtcgacttcgctttgcattctctccaaatccgcatcgtcgagcgttacgccgtctgcattgaatacaacttcgggaatcgcaacgagatcgtaaccgcgcagtttttcgacctcgcggacgatatcggaggcggtgagcaatcccgtcacatcgacgttgccgccgaagtactcgtttttcacggcaagcacgtccatgcgacccgcaagaggccctctttcgataagcggtatcagaaactcgcgctgcgcgaatccgaccgcataggcaacgtgcgcgccgctgcgttcgagtacggatgcgagccgggcctcggcttcgccgctcgcctcccaatcgtcgacgaacgatctgatgatgcctatgccatcctcgaacatgtcgtaatcgccgtaatacgaggcgggcggcagatggtcgagcaaatcgcgcggataggcgttgcggtagaactcgtctgcagcgaaaacccagggcgtcgcgcgctcgacaagcgcacgctgctggtacggctcgatgcattcgatgaccgcgcgggcatccgcttcgtcgttgaagcttctgctgaaggcgctctggtgcttggtgaaccctatcggcacgatgccgatgctcttgatgcccgcacgctcccatgcccacgcaagcgtgcagtcgagctcttcgccgtcgttcacatcgggcaaaagcacgatctgggcatgcacttcgatacccgcttcgagcaaccgatccagcgcggctatcccgtgagcggcgtgcttgccgatgaggccccggcgcacctcgggagttgcagcatgcagggaaacgcgcaagggagatatgcgctgttcgataatgcgagcctcatcacccccggtcagattcgtgagcgtcacaaaagttccctggaggaagctcaagcggaaatcgtcgtcgcgcagcacaagcgaagggcggacatcgtcgggaagctgcctcatgaagcagaacgtgcacgcgttgcggcaaagcttcacgtcgtcaaagatgacatcctcgaattcgatgccccaatcctcgcccggatcgcgctcgagcacgacttcgccctcgtcgcccttcccatcgatataggacagttcgatctcgtcggcagccgttttccatcgccaatcgatgatatcgcggacagggctcccgtcgacggcggttatcgcgcagccgggataaaaccccgcatcgtcggcagggctttcttcttcgatggaggctatgcgcgctatcggacgtgcagccatgcgcctacagcgattccaaccgttcgaccaccgaatcgatctgatcttcgggagtcgatgcaccggccgtgacgccgatgaccgcgcagccctcaaaccacgcgggatcgatctcgtcgggcgtctcaacgtggtgcgaacgcgggcagatcgccttgcagatatcgtagagacgcgtcgtgttcgacgaattgcgcccgccgatgacaacgagggcgtcgacctgttcggcaagttcggcggcagcctcctgcctctggcgcgtcgcaaagcatatcgtgttcttcacctgcggctcgatgccgcgagcatgaagcgcttcgacaaccgcgtcgagagcctctttcgattgcgtcgtctgcacaacgatgccgacgggttcttcgatatgctcgggaagctcttcggggcccgcgacgacgatgcacgtacctcccgacacctcggcgtgggctttcatgccctccacttcgggatggcccgcctcgccgacggctatcacatggtagccttcgtcggcaagccccgaagcggctttctgagcacgcgccacatgggggcacgtcgcatcgatgatgggcagccccttcgcttccgcatcctgcttgacctggggaacaacgccatggctgcgaatgatgacgatgccatcgctcacctcgtcgagcgaagaggcgacgccgacgccgcgcttttcaagcttcgagacgacctggggattatggatgagcggaccgagcgtgtaggccgtgctgccgtcgcagatggcggcataggccatgtcgagcgctcgctgcaccccgtagcaggcacccgcgtgccgagccttcaacaccttcatgccgcattcccctcactcgcagcgcgattcgcgcaatcgatttccgccaccagctcctcggttgtatggcgcgcaacaacatggtctgcgaattcctgcgtgaagtcgcgcgaagttggaaaaagctcgcgcatatcgacttcctcgggtgcgcagcgcctcgaaagggcaaagcactcccgcatggcataccatgtgcacgcatcgagacgatcttccttgggcaggaaatcgaaatcggatacgaggatcggattcccgtattctatcgtaattttaggaaatctaaagaacttccctttttctttgactttttcggcgttgcgaacggtcatgggcaggatgggcgcatgacccatacgggcgatgaacgccgccccgctgtggatctcgggggttttcgaacccttgccgcgacgcgtcccttcaggcagaatgcccacgcactccttgttcttgagcatgcgagcggcacgcttgatggccgaccgatcggccgaatcgcgcttgatgggaaacgcccccacgcgcgagaggatctgtccaaccaggccgtgcgcgttgtcgaaaaggtcttcgcgccccaaaaacctaatccactggctcaatcgcgcagacaggtacatgaaagccacgtcgagaaacgacgtatggttgctcaccacgagcacaccgcttttccctttgaagccgcgcaggttctcccgcccgtcaacgcggtatctgaagcatgctttgaatacgatcgccagaaaccagtatatgatgtttcccgcccagtggggcacctgcttatcatcggagtcgccgcccagcggcatatcccataacttctcgtacggcagaaacaagctcatcgggttccttcgaatagatcgtcttgcatcgaaagccgctttcggcggcagcaacctattctaacggttcgccttgctcgaagccatctcgcagatgcgctcgatcacatcttctatatagctctcagtagaatcgatatgcaccgcgtcgtcggctggtctgagaggcgaggtctcacgggaagaatcgtgttcgtcgcgccgcttgagatcggcgagcacctcgtcgtagtcgatcgagccgacgcccctatcgacgttctgccgcacacggcgatgggcccgttcctcgtctgacgcggtcaaaaaaaccttgacttccgcttcagggaacacgacagtgccgatatcgcggccctcgaccacgtaatcgcccgcattcccgatgcgctgctgttgggcaaccagcgcctcgcgcaccggcttggcggccgaaacggggctgaccgccttgtcgatgtccgccgtgcggatggcatcggtcacctcggttccatcgatgaacacgcgcttgggaacgggatccccggcaacgtggccgaacgagatttccttttcgcgcgcgatggctccgagcgcctcggcatcgtcgagggccacaccgtctgcgagcgcgcgccacgcaaccgctcgatacatcgcccccgtgtcgagacaggagaatccgagctttttcgcaacggccttcgccaccgtcgatttgcccgccccggagggcccgtcaatcgctatgatcatcgcgtcaacctttcgatatcgtccaagaattcaggatagctgatcttcaccgaatcaaagttctccacctcgatcggaaccgaaccgcacagacccacgagcgcccatgtcatcgccaagcggtgatcgcatttcgaatcgaacacgcttcccggctgtgccgcaaggtccggctgcccttcgatgaacaggtcgtttccgtcgatccacgcatcgacgccaagcaggtcgaggccttcgactatcgcggccaagcgatcggtttccttcacgcgcagctcgctgacatcgcgaaacaccgtcacgccacgcgcgtgggccgccacgagagccagcacgggtacctcgtcgacgatgctcgcgatcttctcggcgggaacctcgcaacctcgcagcgtgccggtataggcagcctcgatcacaccgtagggctctttgccctcggagcctgtatgccgcaccgcgatatcggcgcccatgcgctcgagcgtgcgggtgaacccgatgcgggccgtattgaggctcacattctctatctggatggagcttccccgcttgagcagcgccgcgcacacgagaaacgccgccgaagaaggatcgccgggcacgatgacctcggccgccttcggaacgctcgggccgacgacgctcgccgtacgggcggcggccgtcgtcttgatgccgtactcgggcagcataagctcggtgtggttcctcgattccgacggctcgttgaccgtcgtcgtgccgctcgcgtacacgccggcaagtaggatcgatgttttcaactgggcggatgccatgggagcgtcgtagacgatcgccttgagcgatttcgttcccgttaccgtgatcggcaggttctctttcccttcgggagaaaagcgaacgcccatcttcatgagaggcgcggtgatgcgccgcatgggcctcttctgcaaagaatcgtctccggtgatggtcacattgacgggccagggagccagcacgcccatgagcaggcgcgctgtcgtaccagagttcccgcagtcgatgggttcatccggctgcacgggaccgcgctcgccccaccccgttatgccgccggccaaactgccgtcgggctgcttttcgagcgatgcctcggcgccgagcgcttcgacggcgcgtatggacgagcggacgtcggcggaatcgagaatgcccgaaatctgcgaggttccctcggccatcgccgagaacagcacggcccgatgcgagatgctcttatcgccgggaacgcgcgttgaaccggtgatcggcgcggacaacggacggatgacggtcttgccagcttcagtcgacatgggtatgctcctttggactcaacgggctgaacgataccgaaaaacctgcttgtatgagatgcgcggacagctgcccgacatcgccttcgtcagtcagaacgaggcttaaaacggcgctgtcttcggttatatggtcgatctcgatggattggatattgcatcctgcttggcttgcgatggtggtggcctccgccaccacgcctttgcgatcctccatgggtatgcgcacttcgagcagcttttccgtgctcggaacccaggctgcgggaagcgcccggcgggcatccgccgctgcagacagaagcgcgatcatggtttcgcgatcccccgtctcgagggcatgcgcgaaccggcctatgatctcgcggatctcgtcgagcccgcgtccgagcgcttcggcgttgtcgaaagcgatgccgctccagagcttcggcgatcctgcagcgatgcgagtggaatctttgaaaccgcctgccgccagccgaaacagtgcctgctgatcgtcggcatgacggctcgcaagctccacgagcgaggaagcgatgatatgcggcacgtggctcacgaccgcaaccgcctcgtcgtgctcctcccgtgaaagcgatatgacgcgagcgccgatgccggtcacgatctcgtgcagcagctggaaatgctcggcagccgtgttctcgtcggggcagaggatccaatgggcgcccttgaacagatcggcgcgcgcaccttcgatgccattcacctcggagcccgccatagggtggccgggcacgaagttatgagggtacggcagaagctgctctgccgccgcaaggacatgcgctttggttgaagcggtgtcggtcacgatgccgcgataatcccatgcggaaagtcgctcgaagtactcgtcgacggcggcgatgggcgtggcgatgaccacgagttcgcagccgcttctcacgtactgctcgaaagcggggtcgtcgggagcgagcgctgccgtcgcccagcccttctcgaccgcaagcgcattcgtctcgggcgagacgtcgatgccgagaacttccgaatcggggcactgctcgcggtatgccgctgcaaacgaagcccccacgaggcccaaccctatcactgcaatctttgtaacgcatgccgacatgcccgctgcccactccttagatcattcggttcggtaaagttattctagcatcatcagcgcaaagcgccatatagagccgcaagttcttcgccttcgactcgccgccatgagccttcgggaagatccccgagcgaaaccgctccgaaatccgtgcgatgaagcgacgtgaccggatgacctatcgcctcgcacatccgccgcacctggcgcttgcgcccttcgtgaatgcgaatctcgagatcggcccgctttgcgggattgccgcatgttcgaagcagtttgacatgcgcgggcagcgtcattccatcgtcgagttcgattccccgacgaagccgctcgagatctttttcggcgggaacgccttcgacgcgggcgatgtagcgcttctcgacgtggcttttgggatggagcaggccatggcccagctcgccatcggtcgaaaagagcagaagtcccgtagtatcgcgatcgagcctgccgatgggatagagcccgggatagcggtcggtcggcacgagctcggcgacgcagcgcctcccctgcggatcgctcatcgttgtaaccacatcggaaggcttgttgagcgcaatcgtaaccgcctcgtcagacagacgcaccgtgatgccgtccaccgcaacttcatcgacaagcggatcgaccttgcttccaagctcggtgacgacccgtccgttaacggtcacgcgtccggcggtcatgaggttttccgacccgcgcctgctcgccgcgcctgcccgagcgaggaacttctgcagccgcatgggatagacgcgctcttccaggacaccgcatccgggctctgccgaagagtcgggagacgcggggccggccgacatggggtcatccgcgtttccgggatcttgcaccgatccgctattcttcaaaggtgagctcatcgaagtcgatcttctccaccacaccgaaacccgaggccatggcggcggcgagcatcgcctgacccgaaggttgtccgctgtcgagttcctcgcgcccgacgcgcgccccgtcgtcctgcgcaccgtaagccgcacgtttcgcatcgtcttccacgctctcggccgcgcactcgcctttcacagcgcgctcgtcgccttccctgacgtcgccggcgcgtctgtccccttgcgcgtcagtcgcgcgccgggccatctcgtcgatgtcgaactgcgcctcgaaatcaccgtatccgtcttccccatcgaccggcgcgtccgagcgggttgcgctcaggcgctcgcggatgaaggcacgcgtctcgtcatcgggcgcatactcggcaatatcggggagatcggccgtcgagcgcaatccgaacttctcgaggaaggtgcgcgtcgtcgcgtagagcgtcgggttaccgggcgcgtcttcggtgcccgcttcgcgcacaagtcccttttcaacaagcgagttaatcgagctgtccgagttgacgccgcgcaccgacgccacgccggcccgcgtgatgggctggctgtacgccacgatggcgagcgtctccatggcagcttgggaaagcttgcgcgtatcccatgaaagcacgtagcgctcgatgagctcgtggtataccggatgggtgaaaaggcgccatccgcccgcaacctcgcgcagctgtatgccgcgattctcgtcttcgagctgagcgcgcaaatccacaagcgcgcattccacttcgcccggctccacttcgagcatatcggcaagcgtgatagtgctcaccggctcgtcggttacgaagagcatcgcctcgagcgcgcccctcagctggtaatcctgcaaccctgaaaacaaaatcactcactccctatcgaggtaatggcttcctcgccatcgaaaatcagttcgcccgagccctctatgaaagcgatgtcgatatccccgaacgaggtttcctgcctgatcgtcaccatggaccgcttgtaaagttcgaggatcgccaaaaacgtgacgaccacgatgggcgcaggcgtctgcgcatcgaccaaatcggagaagcgcagctgcttgctgttcttgacgcgctgatggatagcccgcacatgcacttcgaccggaatgggcttggccgcaatgtgctccgattccagcaggaaaatatcgcggcgcgcgtacatttcagcgcacaggtacgcaagcgcatcgagcgttacgcgctcgaggtaatcgggtacgagcgaaaggaagttcagatcggggccgaagggccgcgcatgcatgcgcccttccgccacgaagcgcgcatggagccccgcagccgcgttcttgaacttcttgtactcgagaagcctctcgaccaaaatgtcgcgggcttccgaggccggtatttcttgaaactcttcggagaccgccgacttctcctgggggatgaggcttgccgccttgatctcgagcagagtcgatgccacgagcagaaaatcgctcgctacatcgagatcgaggttcgacatacgcgatacctcggcgaggtactgatcggctatttcggtgatggagatggcgccgatatcaaccttctgcttgcttaccaaatagagcagcagatcgaacgggccctcgaagctctctatgcgaaccttgtacgacatggcaggcttccgctatcagataagcccgggcgggaacaagaggcccgcaaggttgtacgccgtcgcgtcgagatacacgccgatgggattcacgtgcagaacgtagggcacgagaatcacgacgatcatgaatatgggcagcgcatactgctggatgcggtagtacttcggcaggtatttcgccggaaggatgaatgcgaagatgctcgacccgtcaagcggcgggatgggcagcaggttgaagaacatgaggaacaggttgatcagcccgaacatcggcaagaacaggtagtaaaagtacatgaacagctcgttttgcaccgcgaggccataggataccgaagagagcgcccaggccacgatcgccgccacgatagccatgaccaggttggccgcaggacccgcgagccccacaatgagatcgcccttgcgcggatctttgaagtagcgcgggttgtagggcacgggcttggcgtagccgaacaccggcatgcccatgagcatgagcagcgcaggcatgatgacggtgccgaacggatcgatgtgcttgagcgggttgagggacagacgaccctggctcttcgccgtgggatcgccgagccgatatgcggcgaacccgtgcgacacctcgtgaaacacgatggccggcacgaagctcaaaacgctgcagatgagatatgggatatcgattgcgttaaacatagtggttgatagtctaccctgagtgcgcgccgccgaagcccaagcgcagaaaatttcacaactggtcgagcacgacgccggtccggccccgcaaagcccgcagctgaaaacaggtctgcgggtaaagaggcggcggcacggcgcgcgcagggcggtttcgcgcgcgttctcgaccgtgcgcggcaatctgatgattttcgtgcgcttcggattgtattcaagtacttcccttaccgaaatcacctcgaaaatggctgtcaaggcatgcttctgtcagaaccaagcgcgctcagtatcttcttacttttttgtgaacaggggaaacgcattctcccttgcccgagcaacaccgaaaacctctcttgcaaggcccaaatggcgacagaagcttcccttgaccgccattttcggcaagttttcaggcaggaagccatgggcgtgaccgatttcgcacgcaacctcgcgacttcggaggaagcttgcgcagccgccctcggaggagcttgcgcaaccgccctagagccttgacggcaataggaattcgaaaccgcgcccgagaaaacgctcgatcccgcacagcgcccgcccgtttacatcaagccggaaaaacgccgctgccgcaaaacctcgtacgctccgatggcgacggcgttcgaaaggttgaggctgcgaagcccgtcgcgcatgggaatgcgcacgcattgctccttatgcgcagaaagaatatcttcgtcgatccctctgctctcccgcccgaatacaaggaacggctccgcaccgtaagcggtttcggcatacgagcggtcggtgcgacccgtgaagaagtgaagttcggcctttgcgtgctcttcgagaaacgcagccgtgcacgaatgccgaacgatttccacctcgtcccaataatcgagtcccgcacgcccaagatgcttttcggtcaagcgaaaccccatgggttcgaccaagtggagcacggctcccgtacaggcgcaggttcgcgcgatgtttcccgtattctgaggaatctcgggctcgaagagcacgatgtgcaaacgcccggccgcaacggtgcgatcccgaaaggcgcccccctcgcaatccatcacgcatcctcctgctggcggcgcaactcctcttcgagctcttcagtgagcgtgaaccattcctcttcggcggcggcaagcctctgtttgagcttggcatgctcggctatcgcgtcgctcgatgcgtcttcattggtgtagaacgacggatcggccataagctccatgagctcgtccatgcgcacgttgtcggcttccatctgacgatcgagctcttcgatgcgcttgcgatggttcttgagcgcggcgtaggcgcggttgcgggcctcagcctctttgcgcttctgctccttggttttcggcgcgctgccgcgcggagcggtcagctggacggcttcggccgcttcctcgggtttcgccgattctccgcgcccacggcggttcacggtgacgacggtcgccttcgacgccgcctttccgcccttgcccttcgaagtccctttcgcggaaggccccttggaacccgcagaggctgcatcgccgatcatttcatcgacaagcgacgagccttcgggtcgttcgccatcgagctgtccgctcttgaagagatagtaatcgtaatcgccgtcgtaattggtcaccttgccgggctgaacttcgatgatacggttcgcaacaccgcgaatgagatggcgatcgtgcgttatgaacaggatcgtcccctcgaattgacgcaaagcctgctcgaggatatcggcgcttgcgatatcaaggtggttcgtcggctcgtcgagacagagcagcggcgtgggcgcgacgagcatcttcgccaacgcaagccggctcttctcgccgcccgaaagcacgctgaccttcttctcgaccgcatcgcctacgaaaaggaaggcgccgagcaaggtgcgcacttgggagatcgaccacccgggggctacgcgatcgagctcttcgaacacggtgttgcccgagttgagttcttcgagctgatgctgcgcatagtaggtctttgtcacgtggatgccgtagtcgatcgttccggcatcgggcgcgagcgctcccgccaccatcttcagaagcgtcgatttgcccgccccgttgggacccacaagcgcaaccttatcgccgcggtagagggcgacgttcaaatcgtcgtaaaccacatgatcgccgaagcgcttctgcacgcgctcgacgcccacgaccttatcgccggtacgaggcggctgtttgaagttgaaatggaccttcttcttctcttcgggaatctcgatgcgcttgatcttctcgagcttcttgacgcgatcctgtacctgcttcgccttggttgccttgtagcggaacttctcgatgaacgcctccatatgggcgatctcctcggcctgcttttcagcggctgccttcaagcgctcgatatgctcctcgcgggcgcgcaggtaggcagagtagttgcccttgtaaagcgcgacctcgccgttgtcgatttcagccacgcgatcgaccatgttgtccatgaacgcgcggtcgtggctgaccacgacgacggtaccggcatagccgcgcagaaacccctcgagccacttcacgctttcgagatcgagatgattggtcggctcgtcgagcagcagcacctcggggtttcggatgagcagcttcgcgagcgcgatgcgcatctgccagccacccgagaactccgtcgtcgaacgctcgagatcttcttccttaaaaccgaggccgaacagcacgcttcgcacgcgcggctcgagcgtgtagccgccgagcgattcgtacatgtcgcgggcgcgcccgcatgcggcgagctccgcctcggtcggatcgtcgccgagcgcatgttcgagacggcgcaaatgctgttcggcggagagaatctccgtctgcgaagatataacctcctcgaagatcgggcgatcctccatttcgatcgcctcttgctccaagtagcccaccgcagcgcccttcgcgaaaagcacacggccctcatcggcgtcttcttcgcccgagatgatgttgagcaacgtggtcttgcccgccccgttaggacccacgagcgcaagccgatcgtgttcttcgagacgaaacgtcacgtcggagaacagcacgcggctgccgaacgccttggagatatgttcgagttgcataatcacgagggcatatggtatcggttcgaccgcttgagcgcaaatgaaaacgtttgatcgaaccgagactgcacacgctttgcacagaggagcttcggcgagccgcgaaaaacgcccccgaccgtcggtcaggggcgttcatatgcgcatcagtccgcacgcggtctcaaaaggcggcgcagattacggaagaaacactgagcatttctcgcctttctcagccattttgacggcgagttcttcaagcgtgccgtactcgatgacgtccgaaaggcagtgcagggcgcacgctggaacgccgcccgcctcaacgcggtcggcgcagaggttgcagtacgtcgtcggaacgggaacgaacttggtctcccactttccgtcgagcttcttccagggaccgagctctaaaagcttgataccccattgacccttcggaagaccgagctcgttgcggcatgcgatctcacaggagtggcagcccgtgcaatattcgttgtctatcatcaatccatatgtagccatggtaatcctccttccaccttcccgtcgctagccttcactgcgatagatcttgcagggtatggcaccgtaatgggagccgaggcccagcttgcctatctccttgtggggcatgagctcgttgatgttcgacttccaaacgctatagagctccttgtctttgtcttcgggataccaccaaccgtgatcgcagctgataacatcctctttcacgaccggggtgatcttcgcgaccatcttgcaacggccccacggattctcgatgtacacccaatcgccctcgtggatgccgtgcttctcggccatggcgggatgaatctcgacggttgcgtaggaatggatctcgcgcaaggactcgatcatgcgatgctcggtatggaacgacgtcacctgacgggcgcccgtcacgaacgtgagcgggtactcctccgcccattcgggacgcgagatcttcgagaagcgcggctcctcgtagtacggcaggggatcttcgccaaggtgctgcataaccgtgctgtacagttcgacgcgccccgtcggcgatttgaacccgggtttgccgtcggcacgcagaagcccgagctcgtactgcttgtacggaacctcgtactgaccgtacacccattcctgtagcgtggggtagtcgatgtccgcatcgggaatggattggatcttatcggtcagatagctctgcgtatccttccacttcacttcgctcgggtcgcgatcggggttgatgcgatgatcgatgtcaagcatgatctcgaggtctgatttgcattcgccctcgggctcgagcaccttcgtcagcgcattgaactgaccgggctggttgcatccgtggaacgtgaccagaccctcatgctcaagcgcggtggatacgggcaagacaaggtcggcgagcgcctggatggtggggttcatgaagatgtcggtggcgacgcagaactccttgtggcggcacgcctcgagccaacgcatcggctgctgagtaatgcaggacgagatgaagttcgagctctgaatgaacaggtattctatgggatacgggcttcccgtaagcagggtgtcaagcgtgcagtccggctgcgtcgtattgatgatgaagtccatagcgggatactgctcgtgcccggcgatgggaatggggttctcgtcttccttctgcaccgtcatgccaacgccgccgcggccagtggacccgccgtttttcatcgtctgcccgagcttgacgccgccgggaatgtcgaggttgccgcagattgcgaagataccccaaaccgcatggccgatctggatgcagttcgggttctggtcaaccttcaaaccaaccgaggcagtgcagggcttttgggccaggcagcgcgccgccgccctgatgtcgtcggcagaaacgccggtgatctcctcggccttctcgggaggcatctcgcgcatgcgctcggcgtactcgtcaaagccgtagcaccagtattcgatgaactcgtggtcgtacaggtcctcctcgatgatgacgttgttcagagccatcgcaagcgcggtgtcagtaccggggcgcagctgcagatgatattcggcatgcatggcaagccagctcgcacgcggatcggcgacgatcagtttcgtgccgcgcttcatcatgtcgatgacgctgtggccgaacaggccgtcggggttcgaccagagcgggttgcggccccagacgagcatgtacttcggaagctcgtagcgaggatcgtcgtagcggtctttgaaaccgaatgctccgtcgtattccacgtaagcgcacccgagaacccagtccatggcggtctgacggggaatgatgcacgaccagcctccgttggcgtgaatggcggtgcggctgtggaacacctggttgcacagctggaactggtaggcgcttgcctcgcggcccgtgcccgtccacaccgagatgctgtcaggaccgtacttctcgcggatctcccagtacttggaaaccaggatgtcgtacgcctcgtcccagctgatacgctcccaagcatcgggattgccgcgcttgtcgcgatcgcgcttcatcggatacagcaggcgatcctcatggtagtaatactcgggaagcgtcaggcaccgcacgcacaggcgcccgttggtgatcggctgttctgggtcgccctccacctttaccagcttgccatctttcacgaataccttcaacccgcatccgacgccatggcaccccggaggcgaccattgggcggtacggaacaccttggtgccgtcggcaagctcttcgacagcgggagtgtccgaaactctccgtaactcactcatcctgcatactcctctcctgtttagcactcgttgtcccttgcattgcgcatgcgttccgtcgccgcattcacacgcgatttccggtgccgcctgcgcctggcactgggtcgatccggccgaaacgcccccgcccgtcccttcccgtgccgtatctccatcttcgatccgaagtgaaatcctgccatctgctagaaggtatgaaagtgccgatcaaacgcacttttctcaacgtcccagctccagctttccatcctatgactctcagtactaggcacccgatcccccgcgtttgtactcgatgcgctcgctgccgcagcatgcgcacttcttcggattctccccgggctgtatctctcgaccgcaatcgatgcagacgaggaccatggccgcaatgggaagatcgggcatcgtgcatttcccgcagtggttgcattcgtagcatccagccatcgctttcgcctacctcccttccctttcggctttcgatacctttttgcgcatgcgattcctgtagagaacctcgacgacggcgagcgcggcgaacccgcaggcgcccacgagcatccccgccgaagcggtcgccgacgagaacaacgccgttttgagcgccgtcacaacgatcggcgagaacgtgatgccgatgttgacgaacacgaggccgagcgatatcgccatcgttgcgcgcttttccgcttcgttgctcaaatagtagatggtgctcacctcctggattcccgacccgaagccaaataggatcccaccgagcatgagcatgggaaacgacgtgctgaacgacgcgatcgccaaaccgatcgccaggatcgcaaagccgaacgcgagcgtcctgtccttcatgactcccgaaagctttccatacgttatccccagtacgaacgccaccagatagttgagcgacgttatcttcgacacgtcggccgacgttcccatatctttctccccgaccatcatcgctatgttggaatgaaacgcgaacgagaacagagcagccaccatgaacaggagaagcaggtagacgaccttgggtgtgaacagctccttgatcccatcggccttgttttccctgtcgatgagcttccgttcgatcccgcctttcggcaaacgaaagaacgtaacaaggaaaacggggatgacggctaggtaaaccaagtatgcgttgctccatcccgtcaaggcgagatacccgaccaccagcgcgacaaccgccgcgccaacgtagttggccgcctgcttgaacccgagcaccttgccacgctgcgcaccagaccatccctcgcagatgatcgccgaggcgagcggatgcataagcccctgagcgatgccgatgagggcgctgctcgcaaacaggatgtagatgctctgcgcacggaacagcaccggtatcatgccgccgacaaacaggatcgccagcgcgacaagcccgatcgaacgcttcctcacatacgacgcgagaaatcccgaaagaagcatagcggggatggacagaagcgaaggcaccgacaaaaccatctgtatgacgacgacgggaacgtcgggaaactgctcgcctatcatcgccaacactgacgaaaatgcactgaacgcgctgtcgaacaccgcaaacgagcaaaccgggatcagcacgatcgcatgttcaaccttgaaatacgaaatgattccttttatccacgaatgcatatcccccacctaatctcacctatgcgcgccgacgaggcggcgcttgatcttgcggctcgttcacctcaggccgtcgacctcctcgccgccctgtacgccaaaaacgcaagcagcgacaagagaatcgcgatcgcgttgaatgcgaaggtcgccggagcgccccatgtctgcagcacgaaaccccccagaaccggaccgagacccattccgatgtccggcccgatgtaaaacgtgttcgccgccctcccgagcttcctctcgtcgaccccccttactgattccgcctgaacggccgcataagccgacgcctgccctaccgccatgcaggcagccgcaacgcaaacggacagggcggaatgaaaaaccgacagctgaaccatgcccgccatcgcgacgacaagcgcgggcacaacgaccaccgacacgccgtagcgatcgctgaccctgccggccagaggcttcgaagccaatgtaacgactgagtacacgacgaagtagaacggcgcgccttgaatcgatccctgctcgcccataagcacgaggaacgtgttgttcgtcccctgagcgatcatcatgagtccggctacgaccgaataggcgaccgcaggcccataaaacatcttgctcggcttgaacagattcgcgaagtttccgatgcgacgatgcacatccttgcgccccgatgcaggctccggcgctttgaacgcgatcgcaagaaagaacccgacgataagcaggcaggcggacagaacgtacacggaggagtacccaagtgacgaacccagcgacgatccgatcgccgggccgagcgcacacgccaaggtgtaggcgatgctcagccaccccacgccgcttcccagcgatcctttcggaacgacgagggaggccatcgagataaccaacgtcgatttgaaagcgaaggcgaagccctgcatagcgcaccatatggcgagagcgagcgttgtcgtcgcggtcgcgcagccgagcgcggaaaccgcgaagatcgcggaagccgccacaaggagattcttcttgctgaagacatccgaaagggacccgcttatcggacgtatcgccatggccgccgttgcaaggagtcccgcgatgaaaccagccagggcgaccgacgcgccgagtgaaaccgcatagcttgccgtgatgggcctcgtaaggtacaacgccatctgcatgacggattccatgaggagcacgtgaacgtatttgcgattccacaaccgctcgggagacatttcggcgacatccaatctcttcgatcattgctcgacgttcaaccgcgagcggcacggcgcatgcgcgctttccgtcacggccgcgcatcggtcagcctttcgcctgcacagcggatacctccgctgtctcgacaagccagcttatggcctttatccttttcgcggctccctcgaccagatggaacctgccgctcttcctcaattcctcctcgtcaaacgattcggacccgaacagcttcgcatgcgccgtttcgaggtctccccgaacaagctccatgccccgtccgtcgaagagggcttcgagagcgaatccctgcctgaggctttcccctgaacggatgagcatcttcatgctgaattcctgctcgttggtcttctcttcctcgaagtaatcgtcaagggtcttgccgcgagccgccagatcccgctccagcttgtccatctgggccttgtacgatgcctgatagaaatcatcgttgatgtccccttgaaggcgtttctccagctcaatattcgccaaatgggccttcgtatccttatcgaggacgagagcgtcgaactccatatcgcggcgcagctcgttgagaaactctccgaccgacgaaacgcgggggaaagcgccttgcacccactcgtcggtcagatcgggggccatcttgcgctgctgactcagcaccgtaaccgtagcaacgaaccgatccacgtcgtcgggggcaatggaccgcgggcgttcaacctcgtagcgtatcgtccgcgtttcgcccacatccatgccgatcatcccttcgacgaaaggcgcgggcatagactccccgtccacgtcgagaatcatgcccttgcccgacaggcgaacaaccgtctcgtcgccgagcttcgtcatgacatcgactttcacatggtcgcccatgcggacgggacgaggatcatcgtcaatgtatcgcgcatgctgatcgagaagatccgcaacgcgcttttcaagatcttcgtcggaaacaatcgtctcgtccatctctatgctcaccggctcgtacgagctcaggctgagatcgggacgctcgaccactgcaagggagtacgaatacgggacacctttctcgggatatccgagcgcgtgaatcttcggcgttagcgcgggggtaacgtcgagagcacgcaaagcatcgctcgttacccggccgatgacgaaatcgcgccgcagctccctgaggtgcttggccggaagagaatccgaaagccggtcttcgatctcggaccacggcaaccgctcgtcgagatttcggcagctcgccagcacctcgtagaactcgccgagcagctcgtcgacgtcatccgagggcactgacacctcgatctcaagagcgcctgccgcccccgcggccttctcaagccgttcgaaattcatggtttacccccgtatccgcaattttgaattcgcagtcgatcctgcagctacttcgccaactccataaggcgcgaaacgtcgtcgacgtcttccagatgccgaacggcgtcgatgatcgcctcgaccgtctcgtcgtccatggcgtgcctcgcataagaagcacagtcccggaacttgcgcgcgaggtcggaccactgcattcggtttttaggatgaccgtacaccgcatcgacccgacgctcgaaaacgcgcccatcctctaaatcgatgcgcacctttcccggcagcatggtcttcgagagcgtgcttttcaggctttcgtcgtattcgtatacggttttcgagcacagatcgagcagcagcggatccttcagcgcctcgagggagaaatcgccgatctcgattttccgataggcgatcgcctgagcaaccgtgaagggcaggctcagtttcgccccgggtatcgacggcgggtttttccgcgcatcctctggctcaagacagcgtttcacgtcatcggcggcgtagtagagcgtgacccgctccaccgccgtcgcatcgatgtcgttatccttcgccaaaccgagtgccgcatcgacatgggagttcgtaaaacggcagcacggccacggcttgatggacacgcccgcaccttcaaatcgctctcccatgtcggcgaatgcgctctggtcgaaaacgccgtcgtagtagacggagaaaaagcccgccttaccgccgaacgtttccttgaggccgggaacgccgtttttcgcaagcaaagcggagagaacgcccgtcatgttgggaaacatcccgtacaagccgcgcagcgcaccggactcgatgacgagctctttcgttcctcccgccctgttgtaggcgatgccgagcgcattttcggtctcttccgcattcaggccgagcagcttggccgatgcggcggttgccgaaaacgtgccgaggagcacgggaagcatccagagcagcccttcgttttcctgtgggttggaaacggcgaaaccaagccggcatatgagatcgttgcccaccgccactgcggctatgaggtccttgcccgatgcggacatgctttcgcctaccgtaagcgctgcgggaaccaccgacgcgctcggatggacaaacgcatcgtcatgggcatcgtcgtaatcgatgctgtgggctaaagagccattcgccatggctgcaagcacttcgtttccgcgctttccgaagccgaccaccgtacacgtgccagcgcccccgagcgtatcgaggagcccgacgacgccctcgacgccttcgcccgctccgcttcccgcaagcatgcagcccagcgtatcgaggatcgccatcttcgaggcttcgacaacttcgtcgggaagccgatcgtaattcgtatcaacaatagtgcgagcaaacatcgatcccaaatccatgaccttactccttctgtcgccgtaagttcgtacgcgccgtctatcgcttcggcgctccgggtgcactcggcggcttcggagccccgggagctttcggcgctccgggagccgcaggcgctccgggggcgccgggaccgcctggcgccgagcccactttcggggcgctgggaagcttcgccccgcactgatcacatgcctcgttatcgaaatcgttttgcgcgccgcactgggggcactttttgctcatatcgatttcagctggcctgaaacacatatcggatacctctttcttttccgtttccatacagcctcggcagccgtgcagcaccgctgccgaggccctttaccgttaagccgatgcgtcggctttcttcgagtcttccctttgcgcaagatccgctgcaatctgctccatcttcttcgggggaaggcggtatccgaagaagaaggctacaaacgcaatggcgaacgcgaccgccggtatgaggcagatgatgtttatcatgccttgagcgagctcgggcgacgcctccatgcctgacacgaagccgattgcggccaacccgaagcccgtcagagcgcccgcaacggcgtttgcgatcttcgggcaccactggaacgtagacatgatgaaagccttcgccgtcttgccgtcgcgccattcgccgtatgcgatggcgttagattgcatgcccatcattgtgccgttcatgaagttcataccgaaatacgcaccacaaatgcacacgatgaacgccatttcacccgaagcaccgacaaagtagcagaagatcatcgatacgcaggaaatgccgatgcccgccagatacgtgatgcggataccgagcttgcgcgcaatgggttcggagacgaacgtcgcgatcaaaccggtgatattcgccgccgtaagcataacggcggccatggcgacgtcgccgaatgcataggtgaacacgtacattgccatgctctgaatggtcatctgcgcaatgaagcggatgatctcggagaacaggccgatgatggcgggtaggttcgtgatccagtacttgatcatctcgagcaacccgactttctcgcccgggtcgatcggagcaaccttctcgccgcgcttcttcgccgcagctctttcttcgcagagcttctgcgtcggatccatcccgtcgatgcgcttgtacatgacgatgaacatgacgatcatgatgacaccgaagaccaaagccagcaccgtaaagcccatgggtcccgcgttctgcgcattctcaccagcagggacgcggtacaccaatccgttgatggcgaggatggccggcagcgaaatcgctgcaaacagaaccttgaccagcatgttgccctgagccttgcgctgcgagagcaacgtgcggtcggcttcggtgcgactgatcaccgggacaatcgatgtggcggcgatcatgaagaagctcgagaagaacccccctacgatctggaaaaatatcatccacgccgtctttgcacccatgtccaggaagctcggatcgacaaacgtcatgagcaggcagacgaacgttgcgggcggagcgatgagaagccagcttcgatactgaccatgcttgagccatacccgctcgataatgatggcggcaatgatgacgaagaaccattccccaacgccggtcaccgctttgaccgtacccatgacggttggttccaacccgcagatctcagtcagaaaatacgaccagtagttgctgttcatctgattgaaagccgtccaagtgagcatgccgagaccgtatatgaggccaagagcctgcgtcacattgttcctgacggcatgctcgaccttctcccctaatgaagctgtttgtgcgctcatgaaacccccttttgataagcgatgagcgtttcccggcgcctcccagcgccgggaaaacacctactgaaccgaatacagcaccatgcgaggcttggtaaccttcttcgcaagttcctcgatgggtccgaattccataacaagcgattggcagtggtgcacgcaggcgggaaccttgcccgcgtcgatgcggtcttggcacaggtcgcatcgctgtgtgggcatgggcagataatcccattcccaggtatcctcatcgagcttccaaggccctatttcggcgagcttgatcccccactcgccctccttgaagcccttttcaaccttgcaggccatttcgcaggtatggcagcccgtgcagaattcgtagtcgatcaaaagaccatgttgcgtcatgagtccatcctcctttctcggtttggctagtcagccttgtacactttgcagagctgcgttttatacgaagacccgtatccgctcggaccgaagtccccttgcacggtcaggcagttgatgttggattcccacaatccgaacagcgaaggctcctccggatccttctcggggaaccaccaaccgtgctcggcgctcaccactcccttgagcatggtgtcggttacatgagcgcgcagcttgcacgaaccgtgcgagttctcgagaacggcccaatctccctctttgattccggcattctcggcatcgatggggttgatctcgaaaatggggtcgggatggaactcgcgcatcgatttgagctgacgatgctctgaatggaagaactcccacgacctacgtccggtcgtcaacacgagcggatactgctcgaacagctcgggcgtcgaataggggctctcgggcggctctttgtggtacggaagcggatccatgccgacgttgttgtacatattgcagaacagctcgacgcggccggagatcgtgttgaagccgagctgcccatcgaagcgaagcttgccgttgcggaacttgttgtattcgaacttcggatagatgatgaccttctcgcgaagctcctcaaggctgacttcgattggaacggtggccatgttgttcgtgcagaactcgagcatctcgggcacatcgtcccagtagaacagatcgggattcatacgcttgccgagttcgagcatcatctgctcgtccccgatcgcctccccggtctgcgtaactttcacgatggagcgcaaaggcgtgtaccagccccgaacgccatcgcgctcgcagctcatggccatcggaatgaacaggtcggcgcacgccatagccgtcggagtcatgaacaggtcgcacaccacgacatgatccatctctttgtatacatcgtatacgcgacgcgcctggccagccatgttggtaaaggcagtcgtgctgcacaggaaaagcatcttgacgggatacggctcgctcgtctccgcagcatggagaatcgcctcgggaaccgcatgcccgcccttgccgatggcgttgagcgctccccaattgccgtcgtcgcccaaacggtctttgcgaacctcgggtccaagctgcttcgatacgttctcgcggatatcgctttgcacatatccgaagtcgatggcaacgaaacccccggggttatcgatgttgccggtgagaatctgcaccgaggcgatagcctgcgaagtgccgttcgcccacttcgtctgatcgacggcaacgccccactgcagcgtcgtcacaccggcgttggcgatcaaacgcgcagcttcgtatatcttttcctcgggcacccaacacagctcggcggccatggcgggagtgtattccttaacgcgctctttgaactcgtcgaacccgtagcaccagtactccacgaactcatgatcgtagaggtcctcttcaatcataacgttgcagatggccaaagcgagcgcggcatcggaaccagggcgaacctgaaggaacatcttcgcatgcgcggacagccacgtaacctgagggtcgacgacgaacagttcgctgccgcgacgcatgcagtcgatgatccaatgcccgtagaagccgtcggcgttggcgcggatcggattgtttccccagattatgaacaggtcgggacgacgatattcgggctcatcgaaccgcttctcgttgagctggccgcagtcggcgatgaacgtagagccgaacaacgcgttcatggcctgcatgcgcggcgtatagcagcagttgccggcaaggaggcccgcgttgtcattcggcgtgccaaagccgccgtgcccgagaacgttagactgccaggtggcgtttctgcccgtacccgctccggtgcagatcgacttcgcaccgtatttttcagtcgtatcgttcaccatctcgataacaaggtcatacgcctcgtccatcgtgatctgctcccatttgtcgtagccgcgatcctccttcgcacgcttcatgggatggatgatgcgatcgggatggtacaccgcctcgaccattgcaagacagcgcatgcacagacggccatcggtaacagccgaattgggatcgccctcgatcttgaccagcttgccatccttatcggtatagaacaagacgctgcaaccttgatggcatcccggcgcggaccactgacaggtgcgcgtaacggtcagatcgccttcttggtattgccaatcctttttgtacacatgcggatcaaagcactccctcatgcaaaactcctttcaacatcgtcatagttacttgacacgctcgccgttcttttgagcgcgcgcccagattccaagcatgatcaggttctcgctcgatatcacgttgtcgtcccccactttgtgatacgtcatacgtgcctgcagctcttctgggtcgcggaactcgtatctgacatacagttcgccttcgtagaggtacgcctccttggtctccagcaagtcgagagtcggcgcatatttgtccaacacctcttgatctgccatttgaacctccttacaattaagccgtccgataagcctgccctataaatgcttttgacccccttctccgcgagcaacgatgcatgtacgaacctgcaattcgaaccatgcaaactgacgggatgagtttttcatctcgatgctttcgacacatctgttgttggatatgattagcttgttcagaatgcgactctggatactatctgggcggaaaggcgggggtatgactcagggtattagttttgagaacaaccaggtaagtggagggttttcagagaaaaccgcgctcgggatcgtcggtttcacacttttcaccgcaagcagcctgacaagcatatacagtccggtgttcttcacggcgacatccgattcttcaaccgtcgtcggcggattgcgcagcatcatgttcatcagcatggcactcgtattcttcgccatgtaccgcctggtcaaaaaacgcgactccttcgtcagatcaactcccgtcagaacaggttttttcgcgatgcagctcctgctgccgacgaccatcttgatcgaacggctatccggcatcgaaatgcccctggcgcttgtcgccgtagcgtgggcatgctggggcgtttcgaacggcttttttgcctgcgcatgggttgacgggcagggaagcatcgacgagtcgtacataacgaagataagcttctggtcgttcgcgctcggcagctgcctggtgatcggcatgtcggccatgtcatcaccgaccaacatcatcgccataagcgtatcggttatagcctcgttcgcgtttctgatgagggcgttttcccatggctgggtgcaaacggacatccacgacgacgaatggctcatcgagaagagcaaattcaaccgcaacggctcctacatcatgctcgtcgacggcatcctcatcggcgtcgtagcctgtttgatcttctattcgatcaaacgaaccggcctcacgcccgccatcttgggcatcgcccttctcagcacggcgctcctgttcttcatactgcgggcccgcagccccgaactgctttcgctcgagcacagccagctcgtgtttcttcccataatcgtctgcggattgctgttcatggagttcacggaagcaccctggcagctcatattctcgctcgtgttgttcgtcgtgctctatcttttcgatttcacgaattcgaccgtgttgtctctcaggggaaacttgctatccgtatccgcatgctattgcttctcgagaggccgcctcttcatcgttgccggtcagggcataggatgggcgtgcggcgctttcctcaccacggaactcggcatgatgaccatgccggcgttcatcatcgtccttgtcgcctcggtatgcctctacatcaccgtcgccgcaatcaatccgaacaaatacccgctcatcgtgaacaacgacgaagagcgcttttccaatgccgagacgaaccaagagccagcaagcccaaccgtcatcgaacgcccctacaagcggaaatgctcgttcgctgcccagaaatacgatctcacgccgcgtgagggcgagatactgttctacctcgccaaggggcggaatgccaaatacatagccgatcagctcttcgtcgccgagcgaacgatcaaaacgcatacgtatcacatctatcagaaaatgggcgtgcattcgcagcaggatctcataaacatcgtcgaagacgagacatcgcccgaaagctgaacaaggcgaacacgcccgtcacgcggaaacccaaccccctgggcagcaggcgaatgcctactcgttggacttgaggctttccaccatgtcgatctttgcgagcttgcgccgcatggccagcgctacgagcaccgagaacagcatcgtgagcacgaacgcgatgacatagctcgccgcatggatctcacggccgaacatcacctgatcgacttccgcggttactacgacgaagttttccatcaccacgccgaaaaccaagccgaccaagcagccgatcacggtgagcagaatgatctctcggaatatgtacgcgtcgacttcgcgcgttgtgaagccgagcaccttaagcgtcgcaatctcgcgctgccgttcggcgatgttgatgttcgtcaggttgtagagcacgacgaaggccagggcggcggccgcgaccacgagcacgacgacgatcgaattcacgcttccgagcatcttctcgtacgaatcgatggtttcgtcgttgaagccgacggtcttcaccgattcaagcgaaagcagctggtcgctcatagtcgagcgcaacgccgaatcggaggttgctttcgcgaagatcgtcgtgaactcgggcgcatcgcctgagacccgctcgtaaagctcgggtgtcatgaacacgtactggctcacgtagttctccataatgcccgtaatcgtaacggaatagccctcatccgtcgtgttcccaatggcatcctgcttcgaaagcagcaagtcatcgcccacaccgaggccgagctccgtcgcaagcttctcgctcacaagcaccgcgtcgcccgacagctcgagaggcgtctgccccacgcgctcgcgcatggttacgaagtcctggaactgcgcggggtcttcgggcacgatcacgtggacgatctgatctttcctgtccggagcgctcgccgtcatgggcgtggtatcggcataggtgtacgcgccgatcacatcggtatcttccatgatctcgcgaacggcatccatatcctcatcggtcggctcttcgacaagcccgacagtcgcgttgtactgatatatctgcccgaactgcttggtgatgatatcgttgatcgcatcggaaagacccagaccggtgagcagcagcgccgtgcatccggcgattccgatgagcgtcatgaaaaatcgcttcttgtatcggaatatgttgcggaacgtcactttccacgagaacgacaggcgcttccacacaaaaccgacgcgctcgagaagaatgcgcctgcccgccttgggggcgcgcgggagcatgagagttgcagggggttcgcgcagcgtcgatatcgcggcagccgccgtcgcggcaagcgtcacgccgacgccaaggcccgccgataacgccgcgatggcggggtcgatcggggtcggggcggccggaaccgtgtagatgatgccgtaggcgttcataatcaccgcaggcagcacctgcgaaagcgaaacgatgccgatgagcgcgcccgccccgctcgcaatgcccgcgtaggcaaggtacttcagggaaattcgcgccctgccgtaaccgagcgccttgaacgttccgatgagcacgcgctcgtcttcgaccatgcgcgtcatcgtcgtcaaggcgacaagcgcagcaaccaggaagaagatgaagggaaacacctgcgctatctgatcaacgcgctgggcatccgatttgaagctttcggcgccgacgtttttcgttcggtccatgatgtaccattcgggcgcgtcgactccgtcgatcttcgcctgggcatcgtcgatctccttttgggcatcggcaagcttctcatccgcttcggccttctggctctcgtactcggcaaggccttcttcgtattctgccagaccttcttcgtattcccgcttgccatcttcatagcgctgctttcccgattcgagctgagcgcgcccctgatcaagctgcaccctcccgctcgacagggccgatgcggccgaatcgagctcggactgcgctgccgcgaactcctcttcaacagcctgctttcgagcggcgaattccgaacgcgccttctcgagcgcagggatgccctgactcaacgccgcctggatcttcttcacgttctcgtcgagcgcagcaaccgtggccgcaagctcgtcgtagccgggatcgcccggctgcatgcccgccagctgctgctgcgcagccgcaagctggggctcaagttcggcaagcgtgctctgtgcagtatcgagctgagcctgctgttcgtcgatggtcgcctgcacctcgtcgaaccccgtctgcgctgcagcgcgctgattcgcgagctcggcaactcccgcatcgtaatcggcctgccccgatgcgatcgcctgctcgttggccgcgatggccgccgcagcctcgtcgagctgtgccggcgttgcgtcaagcgtttccttcgcatcatcgagctgggctttcgcgtcgtcgagcttctgcttcgcctcgtcgagccgagcatttacatcatcgcgctcccgctcgaagtcctccttgttccgatcgagttcgtcttgcgcctcccgcttgatttcttcaagcctgcgctcttccccagctgacgcgatcgcttcgatctccttgaaaaccacgtcgactttttcggcgtatgccgacgaagagccgcgctcgtccttcgcatcggcaacggcaacgtagacttcggtgtagggctgatcgtccttgaatgccgattcgggcacgtacatgtactgggcaagcgccccgctgccgaggcttgtcgttccgaggcttcccgacgaggtgtaatacgaagacctgacaaacccggtaatcgtgaagcttttcgcattgagcgcatcgccgagatcctgcgacccttcggtcagcacaaccgtatcgcctatcgaaaggggggcagccataaccgcatcggcggaaacgacgcattcgtcgggttgcaccggccacgtcccctcgacgagcagcggacgattcaagtagttcgaatcatcggaaacggcggcaacaccgtcggaggtatcgctcgcctgagctgcggcgacatcgagcgaatggatgcgcaccgttacttgctcgccgcccatgagagacgttgcgtcgatctggtaagcgggcatgacgcccgaaacgccgtcaacggctttgagcgcatcgacgtcatcatcggtcaggcccatagtcgaaagcacgcggatatcgtagagatcggtgccgtcgtaatacgtatcggcggcgaggttcatatcgggcgccgtcatgcgaagcccggcataaaaccccgtccccaacgcgacgatagccgcgatcgcgaggaaacgcccccacgaatgcgagatcgaccgccaaaaatctttagcgaatgcgctgcgcatcggctcttaccactcgatcgtctcggccgatacggggtgctcgtttacctccacgcccgcaaccttgccctcgcggatgtggataacgcgatcggctatcgacgtgaacgcccggttgtgcgtgatgagaacgaccgtgcgacccgtttcgcggctcgtatcctgcaaaagcccgaggatggccttgcccgtttggtagtcgagagcgcccgtcggctcgtcgcacaaaagaagcttcgggttttttgcaagcgcccgggcgatggcgacgcgttgctgctcgcctcccgagagctgcgctgggaagttgtcgagacgatggccgaggcccacctgccgaagcacgtcggctgcatcaaggggatctttgcatatctgcgaagcgagctccacgttttcgagcgccgtgaggttctgcacgagattgtagaactggaacacgaaaccgatgtcgtaacggcggtaatacgtgagctccttggtgtcgaacgagcttaccctcctcccatcgagcacgatggttcccgacgtggccccgtccatcccgcctagcatgttcagcagcgtggtcttgccggcgcctgaaggccccacgaccacgacaagttcgccctcttcgatatcgaaggtcatgccgtcgacggccgcaacctcgacttcacccatcctataggtcttccgcacatcgcggaattcaacgaaagccataccgactcctcagtcaattctcgctttattatagccttccgcccgctgtaagcggcgaaagccccgacacggcgaaaaacctccgcatcgcaaagcacccgccgtggcggcaaacggcttcgacatccattattgtaaagccaatcggccgcctccctcgctgaaaccgtttcgttggcagcccgttgccgcgcctcatccaacgttgaccggtttacccctagaatcgatgcccataagccaacgacatcaggaggacaccatgtcagatttcgccaacaagatcaaagatgcggcaaccgacgcgaagaacgcagcgaaggatgcggcccacgatgcgggtaacgccgttaaagatgcagctcacgatgcgagaaacgccgcccaagatgcagcaagcgacgcgaagtcgaacgcgaacgagtagcatcgggcgtcgaaaacgcgaacgaagaggagccccgcaggagtcgaatatcctgcggggctcctcttcgttttacgatgatttatgtaacacattttcgaaatcaacagcggggcttcaaatagggcacgagacgttttcgatctccgcttgcgcactcccacagcgattctcggtcgtattatcggtgccaggttaaccgcccaagtcggttcggcccgcacttccgccgcgtttcgcgaacgcgactcgcagaccgcaccgcttgcgcagaagagctctgtacacacaagtcaagcgtcccagacgaaaggattttccatgagcctcgaagagagaaggaaccgcgccctcgcactttcccagcacaagcatgagcacatgcgcgcgccccacatcgacaaaacagccatcagcccctacgacgattactgcgacggatacggcatgcccggcgcctacggcaacggctacgtatcgatcctgaaggtgtcggcaggcaccgtcgagaagaccgacgacggcctgatcgaccgcatcgtcacttacgacaaggccgaagcagccgatgcctacatcggacagatcaacatgctgaccgcttcttcgttctgcggcatggcgggccaggtttggggctacgacctcgcccgacacgatgacatcgactcgggcaagagcaagcctctgttcaccgtcgagcagttcgacggctccgagctcaaggtgttcgatgcccagccgcttctcgacgccggcaaagagctcttcggcaccgaagagaaccgccgctatcacctgatccccggcgcgcacaccatctgcgccaacaagggcatcacagcctaccgccccaaggaaggcgaactcaaggacgggcaggcttacggcgtgtggtcgttcatcgccatctcgctttccgccgatcgcgatttctccgccgacctgttcatcgaagatgcgggcgtctggaccgaaaacgacaacgaagaagacatgatcgcatttctcgaagaccatcgtcgcgagatcgtctggtcggtcgtcgaatgcggccgcgactcccacgtgctgttcgatcgcacctatgtcggattcgcctatcgcatgatgaagcccggcgagatcggcaacgccatcaccgtcggcccctacgtcacgctggctcgcaaagcggttcccgccgatgggttcacgtcgctcaacgacatcaacctgaccggctggctgaaggaaatggacttccaaccccttaccgacatcgcgcaagggtaatgagacgggactggaatcatggcagataaaacctcttctggttccagcggagcaccgacccaagacaactcgaaaaaagtaggcctcatcggcctggtcggcatcgtcatcagcgccatgatcggcggaggcatctacaaccttccgcagaacatggcgcaggacgcttccgcaggagccatcatcatcgcctggatcgtcaccggcgtgggaatctggttcatcgcgaacacgtttcgcatcctttcggccgcgcatcccgagctcaccaacggcttgtacgcctacgccgagaaagggttcggtaagctcatcgggttcttcgtggcgtatgggtactggatatgcaactgctttgcactcgttgcttactctgtgctcatcatggccaccctgaactacttcatccccgactttgccggaggaaacaacatcccctcgattatcggcgggtccatcatcacgtggatcatgtacttcctcgccctgcgcggggcgaagcagacgagcttcctgaacatcatcggcaccatcggcaaactggttcccgtgatcattttcatcctcgccgtcgcaaccatcttcaagttctcggtgttcatggagggcttctggggcatgaaggacggggtagcgctcacgctcgattggtccaacgtcatgccgcaggtacaatcgaccatgctcgtaacgctgtggctgttcttgggcatcgaaggcgcggtcgtggtatcgggcagggcgaagtcgcaggccgctgttcgcaaggcgaccatgataggcttccttgtgaccctcggcctgtacgtcatcgtctcgcttctgcccctcggcgtcgatacgcaggaagcggtcggcaaaatggccgatccgtcgatggccgccatcatgctccaatcgtttggcagctggggtgagatcatggtgaacgcaggcgtcatcatctcggtcttgagctcgtggctcgtctggatgctcatgctcggcgaaatgccgttcgcagcgtcgaaaagcgggatcttccccaccgccttcgagaaggagaacaagaagggcgctccgtccatatcgcttctgtggaccaccatcgtcattcaggtagtgctcatcgcatcgtatttcatcggcagcaacgcctggacgaccatgatcagcatcacgagcgtcatggcgcttccgtgctatcttttctgcacgttgttcctgttcaagatagcgctgaaaaaggacagttatccaaaggggatattcgccagccgcacgagcgccatcgtaaccggcgtgatcggatcggcatacgggctgtggctcatatacgcagcgggactcaactacctcatggtcgcctgcatcgtatacgcaatcggcatcccgctctacatagtaggcgtcaagcagcacaacgcgaaggcgcagctgttcaacaagcgcgacaagatcatcgttgccgtcgtcattgcgctcggcatagcaggcgtcgtctattccgttatgagcttcggccacttctagcacgagcggattttcatgcacccgcgcaaaccccctcgcacagcatcggttcaacgagggggtttctctgtgcgacgcagcgagtcggatcccttttgcgccaaccttccgaaacacggcgagaaaaacgctatacttgtgatcgtatctgcgtacccgcacgaccacgaaagagaaacgaccatgagcatcgacagctacgaggcgagccgcaagcgctccgacgaaatccgcgccgatctacccgaacatcccgaaaagtacaccatgctgacgggcgaccggccaacgggacgtttgcacctcggtcattacttcggcacgattcgcgaacgtgtggccctgcaggacctcggcgtgacgacgcgcatcatcatcgccgattaccaggtgatcaccgatcgcgacaccaccgacaacatcgccgacaacgtgcgcaacatggtgatcgactacctcgcctgcggcatcgacccgaagaagaccatcatcttcacccattcggcagtacccgccctcaaccagctcatgcttccgttcctctccctcgtgaccgaatcggagctcatgcgcaaccccaccgtgaaagccgagatggacgcctcgggccacgtgctttcgggcctgctgctcacctacccggtccaccaagcatgcgacatcttgttctgcaagggcaacatcgtgcccgtcggcaaggaccagctgccccatatcgagcagacccgccagatcgcgcgccgattcaacgagcgctacggccacgtgttccccgaacccgacggcctgctgaacaattctcccgccatccccggcctcgacgggcgcaagatgtcgaaaagctacggcaacgccatcgcgctttcagccaccgcagaggagacggcgaagctcatcaagaaatcccaaaccgaccccgatcggttcatcacattcgaccccgaagcccgtcccggcgtgtcggctctgctgacaaccgcggcgctctgcacgggtcgcgatgaggccgaaatagccgccgagatcggcgatggaggctcgggcacgctcaaaaagtacgtcaccgaaagcgtcaacgcctacctcgcccccatccgcgagcgcaggacggagcttgcaagcgacatggattacatcgaggacgtgctgcacgaaggcaactgtcgcgcgaacgacatcgccaacgcgacgctcgacgaggtgcgcgaaacgatgggcatggtgtattaggggcttccccgaattcaagccgccgcacgcttcaagaggccaaccgcagccttgcttcgttggatacccatcgcccgcaagcagtcccgcgatagactgctgttttgcggatcgtttgcgggcgatgcaacgaatatgcgcgattctgccacttttactcgacagtcctgcaaaatgcaagatcatgcatgaatgtcgcgaaatcgccagtgcgctgaacagggcgtttcgtatagccatgtgcggcggtctctcaatttgacattttcgtgcgctgttttcgcaggactgtcgagttattttggcaaaatcgcttgatttccgcgcacgggccttcgcgcaagcttgaccgagactcattttgctacgcagcaccccgaagcgcctcgaaccgaaagctgccgaacgagccgtccgcatcgcatcgaacgcaccggctcccccctagagcgcaatcgatctgcattcccgcaaccgcaacaacgcagtcgccgaaaaaaaacaattcgaacccccgaaggggttcgaacagattcgttatggctccccgggtaggattcgaacctacaaccctccggttaacagccggatgctctgccgttgagctaccgaggaatggcatgcgcttcatgcgcaagtgaaaattataccgtaacgccgatgtttggcaataccgaatttcaaatcaagctggagttttccgacacgttaccgacgggcctcgggcatagagcgaacatacgtatggtatactggcaaaaccccagaagaatggactcccatgatagtcagcgcatcgcgccgaaccgacataccgcgtttctacatggaatggctcatcaaccgtctgcaagccggctacgccctcgtgcgcaatcccatgaaccgatcgagcgtatcccgcgtaccgctcgaccgggaaagcgtcgagtgcattgcattctggacgaaaaaccccgagccgatgctcgactgcctcggagagctcgaaccctatccgtactacgtccaattcacgctcaacgcctacggaaccgatgtcgaatcggcgcttcccccgaaagctgcgcttgtcgaaacgttcaggcggctttcatccgccatcggctcgcatcgcatggtttggcgatacagccccatcctcgtaagcgaccgctacaccgtcgagcaccatcttcgctatttcgaggtattcgcgaagaaactcgaaggattcacctcgcaatgccggatcagttttctggatatgtatccgaaaatcgaacagctcatgcatgcgaagaacctccgatgcgttcccgttgagcaggaaaccgaccttgcacgggcgctttgcgccatcggagcaagacacggcatggaggtcggcggttgcgggacgatggatctcgatgccgcgggcatggcgcgcaaaggatgcatcgacccggctttcgtcgagcatgcgatcgggttcggcgcggttgacgccgcagcgacggctggccggaacggatgctactgtatgaccagcgttgacatcggcgcttacgatacctgcgcgaacggctgcgtgtattgctacgccaacgcggggggcctcgcaaacacgtcgagcaatctctgcaaatacgatccggattccgagctgctctgcgatcgcctcaacccaggcgatacggttaccgaaagaaaggcgctccgtctaatcaccccccaaacgcggcttgacatctagcttgcagcacacttcccgtgcgctttgcatgcttcatgaaaagataattcaaatcagagttcgctaaaacgggacatagggagatcccgagatacagaaaaaggaccttcgaatatcaaaggtcctttcgagtttcatggtggtcgctacaggatttgaacctgtgacccccgccgtgtgaaggcgatgctctcccgctgagccaagcgaccgaatgcacatttcgaaaagctttccgtgtgctcgaagtattttagcggtcataccgcccgagcgcaagggagaatctggttttataggttttcggggcttacggtatgcgctcacttgcgttagaatactatctcgcgccagaagcgcacgctaaccccgggcctatagctcaacggtggagcagaggactcataatcctttggttgcaggttcgaatcctgctgggcccaccataaaaccgttttcgaaccccggcttgtcggggttcgctgttttccaggcactcggacacccgaccccctcgcggctgccgcaacaaaaggcaggcgggacgcacgacgcatatcgctcacttcttcatttcgagccgttttatctccaataggcgctcggcctcgtcgctcagtgcattggcgctgccgtgcacgtgctttgcggccagcaaaagaacgccgatgacgccagcgatgtacacctcgggatcgcatcgatccgattcgatggcgatacgcacgcattcgagagcctgcacgacatcgcccgaaatacttgcagcctccgccaagtcgtcaacgaaagccatcggtaccaataccccatgttcgtctccgcgatcatccaccacgcaaccactcccttccgaagccgaaactccggcttcttcttgcggagagcatcccttgaacgaacaaggctgcgtggacgctcctgacttcccttcctgcgcacttctcagtttacgcctagtagaaaataggcacaagatgtggtagagttatacattagatatacacaatacgtattatgcatataggaaattcggaggaacgatgaaggcacaagacgccctacgggaagcaatctcctcttcgggcaaaagccaagcgggcatcagcaagagcatcggaaagacgcgcaattacgtcaacgcgctcgtcacccaagccgatgccacaggcggcacgctcgagtgcggaaccgtcgcgggaatcgcggatgcgtgcgactatgcactcgtgctgattccccgaggaaccgaacctcccggatcgctcgtaatcgatccaccggcaaaatagcggcaccatcggaaccgtacggaaggcgatgcttcagtgcgcagcagcacgacgggcttaccgtatgcacgctcggctcggcgtcgaagcactgcaccgagccgagccgaaagcaagcactaccgcgcgaacatgagcctttcgctcttgaacatcttctgcaacacgtacacgccgatgccggtatacaccaggttgctcgccacgcacgctacaacggctgcaggctggaaatcgaaggtgaatattccgatcatgcactgcacgctgttgtagagcgggacgaagtagtagccgagctcgggcttggcgccatcgccgaacatgccgagcaaaccgatcaccatgaccacgatcataagcggcgtcaggtaaagctgcgcttccttcgtcgtcttcgcaagcgccgacaccacggtgatcagcatgacgatgagcagggtggtcgagaagatcacaagcgccagcagcagatactcgggtgctccgtatacgtttatatcgaactctccctgcatcaggttcggcaaactggcgaaaatgccgatagcgctcgaagcagcgatcgcaagtccgatgagcgcgagcgccaaaatcttaccgagcgctatatcgctgcgcttgatcggcgtcgcaagcatggtcgccatcgttccacgctccttttcgcctgcaaccgcttcggatgcaaccgacatgcatccgctgaacagcaagatgagcagcaacataggcacaatggatacgatgatcgttgccgcaagatccttgtcttcggccacatcgtagatcgcctcgccggcattcacgtcgaacttgttcgaaagagacgattcgtacgcgtcgagcaccgcaacgaacgcagcgtaagccctggccgacgaggtatccgccgaattgtaatacacctcgacccgtggagcgatctgccccgacgaggtctcgtaggcagccaccgcctcatcaaaccccttggggaacaccgcgaatgcctgaacatcggcgccatcgatctgctcccgcatttcctcaggactcggcaagctcgccgtttccaccagatcgatacccgaagccgccgccagctgctccacgctcgcgggacaatcgaccacggcgatcgtcggccgttcggaatcgccgccgcccatcatgcccgacatcgcattgcccatgatcgaccacatgccgaagatgagcaaacccggcaatacgatggcgatcagagccgacgccttattgctgaagaagcgtgcaagctcctttttcgctatggtaagcacactgcttttcacgaggcatcacccaccgtcatgcgatacatgtcgaaaaacgcatcctcgagcgaccgatctcccgtgagctcttccagggtgccgcttgcaaccatgcgccccccgatgatgacgcccgcgcggtcgcacaccttctcgaccaggctgaagatatgggtggaaagcagaatggtcttgccctcccccttaagctcaagcagaaaatcggtgaccgttttcgccgtaaggacatcgaggccgttggtcggctcgtcgaagatgatgacgctcggatcgtgcgccaccgaaaccgcaagggaaaccttctgcttcatacccgtggacagatcggcaaccttggtttcggcgaacgattcgatgccgaaacgcgagaacagactccgcttgcgcgcttcgcgcaccccatgatcgacatggtgcagttccgagaagaaatcgaacaggtaatccggcgagaacacctcttcgagcttcaattcgctcgtcagaaacccgatcgtctcgcgcacgcccatcggatcgctcacgatgctcgatccgttgatccacgcatcgccttcgtcgggctttatgagcgccgcaagcattctgagcgtcgtcgtcttgcctgctccgttcggaccgagcagcccgtagatctcccctctcaccacctcgaacgaaaggttgtccacggctgtttttcgccgctcttcagtgtgctcgagtttgcgctgctttgcggaaagcgggtaggtcttccgcaatccctgcgctcggatagctgattccatgtgcctcgtttcttcgtttcgtttacgggacagggcttgtcaagccgctttgaaaagtataccgattcgcatgcgccattcggtaacaacgtgcaaaaaaactttgcctgtcaaagcaaacgcaccgagatctcccgtgccatccagtatctgacgtttttcatacttgcccaagggcttgtctggtgctgctactacctcgccctcgcagcgttcgatccgaatcaagtcgattatgcgacggggatgtcccaactcatcgtttcggtactcacgatcgtatcgatcggattcgcgttcttcgagtttctgcgcaaaaaatagccggaaacgatgctgtgcgagcggctagtcttcttcacccaaacgtatctcccccgtttccttcccgacaacgaatatagcttctgtactgctatgatgtacttgaaaacgaggtgatacatcatgaaggatttcaacggtttcttaagggttctcgccagcgacgaaagcaaggccgaagtcgagcgcatcattctcgacaacgccatggaagaagagcgcgaaggcaacgacatccacacgtacctctataccgtcatcgatgccgtaaccgactacaagctgcgcaagtaccacgaatgggtttcgcaggactgaacggaggatgtcatgatctacaagaccggcgacaaacccggaaagggcacgtaccgctgcacaaagtgcgggttcctcgtgcacctttacgataacgacggaaaactgcccgcatgccccgcttgcatgcatagcgaatacaccaaggtcgactgacctcatacccacccggccgcgtcaaccccacgcggcatactccaaaagggcgcttccataccacccccccccaagcaggaagcgccctttctcatgccacgaaacagcgactagcgcggcggcgcccaaacgctggtgactgggctttcgacggttgggcgcaagggccttcgaaccccaaaggaaagcgctcggcattgcgaaggtcaacagaagcgaagatcatggtatgatcggtttatgcagcagatgcttcccgacataccgcttaagaactccgttgacgtatcgggccccgatgcaaaaggcgcctggtcatgcaagttcttcgctttcaataccgaaatcctgcttcagacgtaccgaaacgatcttcccgaaaaaaccgttcgtgaaggattctcggctgccgtcgaacggtgcagaaccttcgagtacctcctgtcccgccatctggagagcagcgatgtctcccgcatcaacgccgcttcgggagaaaaggttcccattgcagcagagacgtatcgcgtgcttgaagcgagcctacgctactgcgaagcaagcggaggcgtcttcgacatcacgatgggcgcggtatgcaggctttgggatttcatggaaaaaaccgtgcccgaccaggcaagtctcatacaagcgctcgcccatgtcaactggcgcgcgctgaagctcgcctctaccgagaacgggttctgggcgcagctggacgaccctgccgcctccatcgatgtcggaggcacggcaaagggcttcatagccgacgatctgcgcgcactgcttgcaggccaggggttctcgaacgccatcatcaatttgggcggaaacgtcgtgaccttcggctcgaagcccgatggaaagccctggacgatcggcatacgcaatcctgcagatccctcgacgctcatcggcgcagtaccgatcaggcagggatcggtggttacgagcggcctttacgagcgttgcttcgaaaaggacggcatccgctatcaccatatcctcgaccccgctacgggctatcccgtagccaccgatatcgccagcgcaaccatcgtctcggcgaactcgatcgacggggacggttattccacaaccgtattcgccctcgggtcgcaaggggcgatcgatttcgccgaacgcacaccaggcatcgaagcgctgcttatccttgatgatggaaccatcgtccaatcaagcgggatctccgggttcatcaagttgtaaacgatcacgagtccaggcgcttcgcgaaacagatgatcctattggcttcagcgaagccgcaagccaggtggaatgcgaggctctccccgttgtcgagttcgcaatcgctcgcgaactccgaacaccccttcgataccgcccacgcttcgcacgccccgacgagcatgcgcgcatgacccctcccgcgaaaccgctcgtccacgaatatcccttcgagatacccgacggggctgctttcggtaccctcgacgtaatcacggcgcaagcggcaccaagcgaaaccggcagcctcttcccccgaaccggggtcgttcggatcggcatcgcgcagcgacaggaaacaagccgcatccgcatcgcgaagatcgcacagcaattcttcttcgagcacgcccgcatcgtgcccgggccacaagagctcggataatcgaaccaaatcgccgatatccccaacagtcgcctcacgtatcaacgcactcctcctttcgctgtcgcagagacagcgacgccctccgatctttgcaccgcctggtcgctgcttcggcgcttcggcgcaaaccttcggggcggccccgcccaaacgaacggccgcctcattcgcttgcccaattgtagtctatcgacggcttgcgccccgccatattcaagctcgaagcgaaaatcttggagtgccgtcattttgatctcgcacaacctttggccgggctgcgaacacagtgcccgccctgcctccgtcgagcactgtgtaaaggcggtcgaggcgtcttccgttcaagatcacggcatcgatgccgttgcgcgtagctaaatcggctgcctggagttttgtcttcatgccgccagttccccgcaaagatcccgctcccccggcgcagcgctccacgtcggctacgtcttcaacgacgtcgataagcttcgctttcggattcgagcgcggatccctctcgtacaggccgtcgatatccgacaagatgacaagcttatgcgcgcggcagagaaccgccacgatcgccgacagcacatcgttatctccgaataagcgctcatccgattcgatctcgccgaagctcaccgaatcgttctcgttcacgactgggatgattcccatatccagcagcgtatcgaacgtatttacgaggttcgcccgcttctcctcccgctcgacatcgtcggcgttcagaaggatctgcgctgtggttttaccgtattccccgaaaaacttgtcgtagagaaacaatatgcgacactgcccaaccgcggcagctgcctgtttcgcccgcaaactcttcggtctcggttccatgccaagcctgtccgacccaatggctatcgcgcccgatgacacaagtatcacctgatagcccctgccgtgaatatcggatagaacacgtgcgagcatctcgaaagatcgcaagtcgacgccacccgcttcgttggtaagcgtggacgtgcccaccttgacgacgatcctctctctataaagatgagacatacccggccccgtccgcaaaagccgcaaccgtaagatcgcgaccggtttctgacaaaagccgattcaggggatgaccggttctcgttttaagaaacctcgcagcaggcccatcgccactctgcagcaggcccatcgccgcaacaatgccatacacgcgcatagctcctccctgtctttgttccccatcgttcttgacactggatcgagtattccataaagtggcatacaacaaaaacggaactttatcattgatcatatgagtttttctcatacatcctcatgaaaggcttgatgtcgagcattacgaaatatcatgcattgctcaaagcggtagaatgcggcagcttcactaaagcagccgcagcactcgattactcccaatcgggaatcagccgcatgatagccgacctcgaaagcgagtggaacatctcactgctcgaacgaagcagcgcacgcttgagcttgacggccgaagggctttccgtcctcccgctcgtgcaggaaatctgcaatgcggaaacgcggctgcaagacaggatcgccgaactcaacggactggaaaaaggattcatccgaatcggcaccttctcaagcgtggcaacgcattggcttcccaacatcattgcccgattccagaacgattaccccggcatcgaatacgaattgctcctcggggattacgaggaaatagagcgctggattctcgacgggcgcgttgactgcggttttttacggctgccagtgcaatccgatctcgaaaccgaattcctcgagcaagacaggctgcttgccgtcctacccgaaaaccatccccttgccgaatatgcgaaactgccgatcaaggcgctacgcgattacccgttcatgatgcttgaacgcgaaaactcgtccgatgtcgccgagctcatggaaagacggggcatcgaacccgacacgcagttcatcacctgggatgactacgccatactcgccatggtggagaagggcctcggcatcagcatccttcccgagctcatattgaaaagaattccttatcgcttaacgctcagagaactcgacgtgccggcgtaccgcagcatatgcttcgccgttcgcacgatgaaaaacgcttcgccagctgttcgaaagtttaaggattacctggtttttcgctccgactcctccacaggctgatacgggtcgaaacgacccgacggtctcgccttctcgcacgcaacggcgcgcccgcaggctctgcaagcggagctttttggggcgcagcgcatgcgacgttgcccgtcgatggcgacgggcaacccgtcttgattggccgcttcgatgcaggttacaacctcgtatcatacagcacaccttcaccggcacgcacatcgcctgctatacaatagtgccgccgaaacgctattgcagcacacctcgaggaaggcgatcttatggagctccccacgaatctctacccttcgatttcgcagcgcaaatcatgccgaaaatacgacatgcgacccttagggcaagaggttctaagcgaaatatcgaacgcgatcgaagggttcgaggaactctatcccgacgtatcgctcgaacaccggttcaccagcaaggtcaaggggcgcttccatgtcgaagccccgcattacctgatcgtaagcggacagggtgcgccgggcgaaatggaagcagccggttttctcttcgagcagcttgttttatggctcgatgccttggacatcggcagcgtgtggctcggctcgtcgaaagacgccgaagccgccggcaccgatcaggatctcgtcgtcatcgccttcggcaattcgcctgaatcgatccatcggagcatcgatcagttcaaacgcaaggagatcgaggagataacgaacgttaccgacgacccctgcatccaagcggcgcacctcgccccctcgggaatgaacacgcagccctggtatttcgaaaaacaggacgagaaggttctcgtatacgagaagaagctcaaagcacctctgtcgcttgcgtataagctctcagacatcgatatgggaatcggcctgagccactatttcctcgcctgcaaggaattcggaaagccgttccgtttcgcccgtgacgcttcgcttccgagcaaagcggggtatctgccgttcgggatcataggatagacgatctagcaagggcctcttgtcgacgagaggccccttctttataccaagcgcctttcgggccaggcggattcagtggcacctgtacatcacagcaacgaaccgacaaaaactggccgataaccgttttcccgtcttcggcatagacggggatataggtcgtacccgctctgcttgccataacaagcgaccgctcgatcatccacttatcaaacgataccccggaaatcacaagcgtgtcgttcggctcggaggcatactcggccgacggcatgccgttctgctgcagggccccgtaatggcaatcgagcactatctgggcttcctcgaacgaaacgtttctgcccgcatgatagctgagcgcagcccgcagcgcctcaacgggtttcgcgcccctcagcggcagatagaccaacgaaggatcggctccgatcgcggcacgccgctcggccgccgcttgctcgtcgtcacagtacacatagcccacaagtccgtttgtcgccagaacctgaaccaaatcgatatgcttgccccgaggcaccacgtcgaagacgcttccgtacgtgagggagggatcttttgtatgcaccttcgccgagcgcatcagcagaccgcatgcggccattgccacgatcacagcaagaacgacgagcagcacggcgtctccattgtctttgctgtgccaaacgcttctacccgctgcacccatcgcaatctcctttcgccaccccgcccgacaactcaacttgccgcatcttcggcatggttctcttccgatccgccgtcaacgtttacagtgatcgccacacactgcccttggggtgtgaagcgaatctgatcgggaacgagggagttctgcacgccagccgcagattggaggctgatatgcgcagagcttttcgcatcgacggaaacatcggcggatcgcccgtcgacgacaacccgcccttcccatcgatatcccgtcgaaaacgcagcgggcgcagcgataagcccgccgaggccgccattctcccccgaagtcatttcatcgaagccacgatagcactggtcgagagccgcctcgagcgaatcgcgatagcgataggaagagacctcttcgatagcatcggccgaaaatcccagatccacaagcagttctgcaacggtttcgcggtcgaaagagtcgatgacatttcgagacccgcccgccgcaagcgccgttgcctcgagttctgtaacctgctcttcggtcagcatgggataggaatgtcttcctgcggaaaccgattcgacgctcccgagatccgcttccaattcgaactccgttccgttcatccgtagttccagcgttttcgcatcgcttttgttcgcccgcttttcgagccgtccttcgttttcgatcgcgaaaaacgacgcgatatcggacgtgcggatatcgcctcccgcatcatcgagcgcatactcggcatccgaagcccagaactccacctctaccttcgccacggcatctgcgccgtccggtatcggcttcacgaagactgccggccaatcggcaaaggaaaccatcgccgcctcaccgccaagcagatcggtcgcttcgtcgtaggccctgtttccagaaagcatctgcgcaatatcaggaaagctatccgtttgtttcgcctcgtcagacggctcttcctgtgtaggctcgggcgcgcgcaccttttgcccgacggccatgcgacccacagaaacgcacgaccacaaaggagcgaacagcacaagcgctatgctcgccgcaaccgcaccgcgcgcaaacgtcgcgatcctcgctgccgccgaggcacgcgcatctcccctatccgacgaggcaatcgatggtttcaccgttgatttgtcatgcgaattcctcatggcctcccgcttgaagacgaataccggcatgctggggcgcaacgatatctcttccgctcatagtttatcatggcgatcgccatccggccgaactccctttatgcgaatcaccttcgtcgcagacccgcctgtcgcgacggtctttttttgcaggctcttttgcagcgcatcgaacttttttcaaacaaccgttgaccttcccgttacggcataccccatactgggtctcgaacgttcagggaaccaaagggaaagacggctagcctatgttgacgatcggagaattctcccgcacctgctttgtaagcaagaaaacgcttcgccattacgacgagatcgggcttctgcgtccggctcatgtcgccgaaaacggataccgctattacacggcggaccagattcgcaccatgcgcctgatcttaaggctcaaatcgtacgggttttcgctgcccgagatagcggcacatctggcctaccccgatgacgaactcctctcccaggcgctttttgaaaagcatcggttgctggaagcgaagatcggcaaagcgcagcgggtgcttaaccgcatggaacaagatatcgaaaaactgaaaaggagcatcgacatcatgaagcaagacattgctgttgaggtggtagaacgcacgccgcaaaccgtcttcggcgtgcgccgggcgataaacgtacaggatttccaggagctattcgccgagctcgacgcctctcttaccaaaaacggcatcaccgcgctcggagcaccgatggcgttttaccatgacgaggacttcagcgccgacgattccgacatcgaggtagccgtacccgttgcagaaggaaccgccggctcgcacccgatcgaaggaggccctcatgcgtgctcgacgctttcagggccctacgaccccgaggcgttcaccgcgctatatgcggggatcatgcagtggatcgacgagaacggctaccatgttgcaggttcgcccttcgatgtgtacgagaagggcggccccgacgtcgacccgaaagactacgttaccgaaatatgcttccccattgctaagtagcggataggaaccactgctaaaaggctggccgatatccccggccagccttttagcagatcggacttacgcttctcccccgcccagtttctctgcgatctcgcgattcagcttctcgcgcagcttcccagcctgcgttttcgcatcgcgtatgagttcgtcgcaaaacgaggcgacgtctttgccggtgatgtcgagcacagggcgaccctccgccgcacccgcttcgaagagatcgataagatcgtactggaccttcagcatgtccattccgtcccctgccgtgaagttccacatgtacttctgggccttctcgtacacgaaccgataatcgtcgggcaacgccttcacccgcgccatcatctcgcggtattccttcttgtcgccgataagcttctcgaatatatcaagcatggctcttgcttcctttcaactcgctgatcttcgccgagacgaactcccacttggaccagaaagcttccaactgcgtccgacccctctcgttaagggagtagaacttcctcggaggccccatctcggatggtttcttctgtgtgtccaccaggccgtttttctcgaggcgtacaaggatcgtgtagaccgttccctcaaccacgtcctcgaatccgagggcgttcagccgccgggtgatctcgtagccgtaggtttcctcgcggctgatgatctccagcacgcaaccctccagcacgcctttcagcatttcggttaggttctccagctcgatcaactcccattttgtcatggttactattctgtagcacttattactagtacatagtatcacagaatagtttgcatgaatagaagcaggaacgcccgtcacaaagccggcatttcgccgtatggaacaagccaacccagaatcgcatctccgcgatcggcgccgagaccgccgcaatagcgaaagcggcccgaagcgcacagaaatcatcagattgttgcaagttgaaggcctggaaaccaccctcggatgcgttgccttgcgcatcgcgacacgtttgcccagctcgggaaaagcagtacgccgttgcaggatgccgataggttgcttttgattgacttcgagtagatacaaggcaccggcctgcaacaatctgaggtaaagcgtgtatctggaacgtcctcatctacgatggaagctgatttcggttttcagcagcggcataccctgaaacagcagcgaagcggggcggagccctatgccccaccccgcttcatcgccgccgaaggttctaacctacaggccggaaatgttgtcctgcacgagttcgaaacgctcgcttcccgggcccctgaaaaacgcgatgcgcatgttcaagcccttctcgttgcacacggcgaacaccgtgccgtccaaatcgcatgcacgatcgaagtcgagcggaggatcgaacggccccgcctccatttcgacgccgtgctccttcagatgagccacagccgcatccatatcgggaacgcgaaatgccaagtggttgagcgaaaccgcggccgtctcgagcggcgtcttatcctcttgctccagaagctccaccaccgtgccgccggggtggcgcatccacgccatcttcagcggcttgtcgccttccatggcaagcgactcgaacaacagctcgaatcccagaacgtcggcgcaaaacgcaagggactcttctatgtcccggcagtaaatgcccgaatgctggctgctcagctccatgaaagcctccttacgcacggtacagggcgatcgtcccgacgttcagatccttctcgatcgtcgagatgaaatcggaaacggtgcgtggcatatacccttcggcctcgaccgtgatgctgtagtctgacggctcgatctgacggaaccagaaatccccgaagtcgtcggattcggtctccttcgtctcccccgtagcgagatcggtaagaacgactttagcgccgatgagcacttcctcttcttcgagatcggcgatctcaccgccgatgaagcgcttcggaagattcagatagtacacgctggggccggtaccgtattcgggatgaagcttttccgcgtcatcaagttcgccggcgaaatcctcgatatcgccgaatcgcagcgcgtcgtgggcgcaagcctcgacacagcgcggtacagaccagccgtcgtcgagcaaatgagcgcacccggtgcacttctgcggaatgtcgagctcctcgttccaaaacaccttgtggtacggacacgcctccatgatagccttctggcccttcgccttcaccggatcgatgacgatcaggccgtcgtcacgccgatacacggcaccgtcctttgctgcagccatgcatggcgcactttcgcaatgctggcacatgataggcgtataggagacggtgactttcggaacctgaccgcgctccttctcttcgacgttgagccactgctggccaacatcgggctggggagccgcgtagggcatccaatcgttatcgcaatgctcgtctttgcaaaccaactggcagctgcggcaaccaacgcacttggctacatcgatgacaaaggtcttcatagggctactccccttccttgatgatgcaggattcggctacatgacccgtgtccttgtcgtagaattttgcaaactcgacaggatattgcctggcaagttcgaacacatcgaccttggcgatgttgatcaagaaactgttcgttacctcaccggggcagttcttcgatgtggtgttggacggacagatgaggttgttcgcgcctccgcggtcgaactcgccgataacgatgctgtcgacgcgcgcaccgtgatcttgatacagcgcacccggaatcacgcgctcgctcagacgaacgccgcccagaaccgcgccgcgttcgttgaaaatcttgcagatgtcgccgtcgtgcaggttcaagcgtccggcatcgagcggattgacccaaataggttcgtacagatagccgtcagggccttcgaccttgcaggtctcgaactcgcgcatccaagtgttgtcgtcgttgttcgcatgcacgcgccatcgaggatggttcgtgatgagcaagaacgggtattccttcgcacgcggatgcagcaagctctcggaatgcgattccccatacggtacgaagtgcggaacgggcggacgctcgacgtcgtcaggataatgctcggcaagcgcagtggagtagaactcgattttgccagtcggcgtcgacagcggttcgctttccggatcctcataccacggacgcatgtgcagacgatcgttttcccagttctcagcggtaggaacgacgaaataacccttctccatccactcttcgtagctgatgtacttctcgcacccggaattctcgaaacccttcttgataagctcgtcctcggtgccttcggcatactgctcgtacagaccgagcttcttggcgacctcgcccacggcctcccaatcggaaagggattcgccgacatgcggcacggcttgctcttcgtgaaggatcatgttgtactgaccagagaacaaatcggaggaaatgtcgtttacttcgagcttcgtggtggtgggaagaatgatgtccgcgaacagggcgtcgttttcaagccacgggtgctgggcgacgatgaactgcagattcggatggcgcagtgcgcgctgcatttcgttgccgccgttccagcaggtctgccaacaggggctgtcagtccatatcatatgaatctcgccagcgccgggctgcgggaagtcccattcgatgaactggtcttgagcgggcatgcccgcgataacgtggccgcctgaccaatgaaccggcgggttcatgatagcctggggaatcagcgttttcggaatgaagttcaccggttcggtgagcatggcccaaccatggtaaacggagttcatatcgggctggagctcacagcgcgggaagggatagatatcgtcgattccgaacagaccgacatccatgaagttgatctgcccggcgccgggctttccaagctgctgcatggtgagcaggcatacctccaagcgagcaggttcgcttgaataggctgcgcggatgagcccgccgcctgcgcaatggccgatcgacacggcgtgcttggcccagtaacgggcgagcgccttgatctgacgcgcagaaacgccggtgatgggagcggcccatgccggagtcttcgcgacgccgtcttccccacccagaatatagcgctcgaaccaatcgaagccgacggaatgggactcgacccactcgcgatcgtacagaccctctttcatccacacgtacgcgatggcgcattgcagcgcagcatcggtattgggaagcacggggatccacttgtcggcatgggctgcagcggcgtagttcaggtcgggcgtgatgaatatctgtttgatgccggcctcggtgaagaagctctcgacgcgcccgggcatcatgccgccccatccccacggcgtggtctcggggtcgcccgaccacatgatcacgcaatcgccgttctcggcgatatccttgaacagattttcggtatgagcctgcttgccgacgggatccatgccccagatgtgcttggcgccccaggtccagccttcccacgaatcgggctggcgggcttgcagggtatagccgcccagaaggtcgagaagcttgccaggacagccgtgcgcggcgtggatgatcttcgactcgccatggccgtcgatctgggccaagacggcaaaggggccgtactcggcgtagatgcgctttagctcggcggcgatgatatcggtggcctcatcccagctgatgcgctcgtattttgcttcgccgcgagtttcgggatgacgctcgccatccggatcccaatccacgcgcttgagcggatagggtacgcgatttttcgagtaaacgcgtttcttgtacgcgtactgcaagggcgtcggaagcgtatgggtcttcggttcgagcacagctccgtttcgagccgtgatcttccatggacgcatgctttcataatcgtatttctcgtcatagtgcataggacgtattcgcaggatctttccgtctttaacatcgacggctgcggagttggagcccaacccgaagccgcagagacccaaagacttgtataccgtcttgccaccggtttctggcattgcttctccttcctcaaggcatttgtttgcaggatgcatttctcttgctttccgcgcccagtggaaagcaagctatacccgtcgagcatcctgccaccgttcgatcgcttggttttcgcacgttttctcgcggaaaccaagcaaaagcgtcgtccgcgttgccgttgaacgaaaacgcgtcctttccccctttcgccgccatgtagtatgatgattgtcggtgctttcgctgaagcccggagccataggcacgtctgccaggacggaacctcgttcgagtgtataacccgaaatacaaacgggctatacctcgatccgattgaaagacctcagacgcatacagcatgctgaggtagtcgccgagttggaggacggactatggaagctataaagccaaatgacaccgcagcaaacaagaccacctcgtcccggaacagcgcaacgaagaaacctgcctcagaagccctcctttctacggcaagccacccggactccggctctcccgcagccgaaccgggacgcaaaggcgacccgcccgcgtgaactcgctacaccaacattccgtttaggcttttaggctacggcatcttgatgggatggcattttctgctcatttacttttcaaccatgccagaggcagccgagcccgatgcgcacgtactccttttgcggcagcttaccttgaacgtcgctctggcgataacgtttttcggcctctcgctgataggccgcaagacagacgtgctaaagccgcttctctctccgcttgcaatatcgggggttgcggcaacgggcgttatcgcgacgatcggaatcatatacacgcagttcttcggagtgtccgtcgccaccgccgtattcgttgccatcgcaggcgcatccgaggcattgctgctgttcgcatggctgcacttctactcggaaacggaaacgaactacgcgacgaaatacatttcggtttccctcgtcatcggcgcgttggcagcgtttttcatacggcacctcaccgtcgaaatcgcctttatctgcttcgtcacgctgccggcgctatcagccgccatgctcgccatcagcattcgccaaacacccgtccgcagcgccgatcgaggaggacgcagcctgagcgaccataagggcgccatgcgcccgcttgccgcttgcacggcgaaccttgccgtattcagcgcggcattcggctttctgcagggaagcatactgcccaacggcaatcctgttttgaccgccttcacccccaatgcagccatcggcgccgctatcgcgggaacgatcaccatgctggcgtacagcaagctgacgggcaggcaagcgcccgaattgctccgtcggatatcgattgcggtattcatcgtcggcatcatgggcgcgatgtatccttggcccgccacaaaagaaatcgcgggaatgtccatcatggccggtttcatgatcgtcgatataacgagcctcgtgtacgtcgtgatggtcattcgcgcctacgacatagcctcggcgttcgccatcgggttcaaccgtgcggtcgagtacgcgacgttcggcgtatccatcgcagccggggcactgctcgccagcgctgcgggaaccgatcctctgtatcctctttacgtgagcagcctggtaacgataatcgcgctgatctacgccatgacctgcatggaacgaagcccgctcgattggatagcccttctgtttccggaaaaaacgcttgccgaagaaggcgcagaagcaaccccagcccaagaaacgcccgcttcgcgcatgccccccgatgccaaatcggggcagttgacgctcggatatttcagaatgaaatgccaggccgtgtgcgaacagtcgaatctgtcaccgcgcgaatcagaggtgctcgtgctcatggcgaagggacgcaatgcggaatacatacaaaacgccttgatggtatccaactataccgcaaggacgcatatcgccaacatctaccgtaaatgcggcgtccattcgctgcaggagctcatcgataaagtcgaacaaacagaaattgaaaacgcctgatc
